United States Patent Application Publication US 2026/0275333 A1 - sequence listing, part 10

SEQ ID NO: 3045 - RNA, 64444167 nt, Homo sapiens (residues 19,333,252-21,481,390 of 64,444,167)
  source 1..64444167: mol_type = mRNA
tgtggtcagacattcagttggttatgaagagtggtacccttttatcttcccccctggacttaatatttatctgccctaatgcatctgttcattacaaccagggtgctcaaactaggggctgagaaacagattctggtgggagcttcagtggccccagcagatgcaggagtcttagggggaagtgacagatttggcctgttgcaaagagcggtgtgggaagagaagggaattgtttcaccaaagcggtttgtggtatcagtaataatcagagaactagggagaaacgaaattttttaaaagaatacatttttgtgtgggaatttgtatttcgttgagcaaacaatatgttactggtgagtccagtcttgctagtgtgtgtgtgtgtgtgtgagtgtgtgtgtgtgtgagagtgtgtgtgtgtgtgtgcagtataactgattattttactgccctggggattaggtgagttgatgactgaacacggtaattctgaaaaatggaggggaaggagcgacattagtataacgattgcatattctgttgcctagcctcagtgccagtaaattgtcctccaccacacatgacttggtctttgatttttgaatgtagccataaggttcttaagctggaataatgtgtgaggtcaaactgcctgtttccatttatggtgaaagaagacaagaaaagacatggttgtgcatcctgtgagtatactaaaaaagggtggaattgtacattttcaatggttaaaatgtatgacaggtgcattatatcagaagaaaagctgttaaaaaaaaaaaaagacagcaaagagaaatagacaagtgtgactatgaagaaatcaaattgtaaaagtcacacaggaaacaaaacatgtaaatgggtggtcgttgtctccgtgagtatggtccgtttatcctaatgacttgttattggccaaaggtcctgagagccagactgtgggaatagctttcagagcctgggatgtattcccttcagtattctcagtgcagtcaaatgttgtccttggagagtggcttgatttttggagatagctaaaataattcaaaagtgggtttggtaattaaataaaatgatcaaactgagaaatatcaacacagtaaaaaaaataaagagtgctatgaagcatacaaaagtatatgaagtatatcaacacagtaaaaaaaaagaattctgtaatgtaaggcaacagacttaatttttttctgagctctcatatattgattccataagtgatcatctttttcactggtaaagttggctagttttcaaacaccaagattcagtgccaacatcaatgtgactgtcttacaatttgtgaactaccagtgaagttcattgtcttaggtgggttcctaaagaaggcaacccaagtcaagccaattaagggaatttcagcaagcaggtgattgctgtgggcagctgggactcattgcaatttggcacctctgggagcctctgtaggacacgcctcagagctctgtaagccaggaaacatggacgctggggggctcatctgctgattcccacctgccattcgctgagccctgcttctaggggtgtttgttggcactgctggcttgacccatcctgcatgtgggctgaatgtcccctcccagccagaaactaagcatacagacacagggttagcatgtcagtggtgaacagcctctgctgtgccatatgcaggagataggcacagagcactgcagcacctggtactttagtctgaatcagaactttctttgatgatggacatattctccctctgcactgtgcagtaatatagcttgaaataggactggaatatgactgaagaactaaatttttaatattatttaattttagtttaattttaaatagctacatacggttattggctaccatcatggatagtgaaagtctaaatagaatattagaaaatgaatccctcaaagtctcatagtctcaaagttaggaattaagagggctagaatgaaatgagtggtgtccacggatatatatccactgccccttaaatcttgtcttttctactttagctggatgggtttccagcttctcttagcccacagataggactttgtgtgctcagctgaagataattgctaattaatgaaattcaacagttttttcgaggaccactgtaggaaattgctgtggccctgcatcctagctctgcacacagagaacagtaattgctggagccttcagtgataaggaattcattcctgtaggactgcccaagtgcttgacttagcccagataaaggctgctcaggtaaatattgttgcaagggggttactggaattatgcctccagctcaatgcccatatttgaagatagtaatggttaggcaattttgcctagtcctttccagattcagtgtattgaccagctcttgacttttaaggtgaaataattgaagctggcaatcagatcactgggtcaagggtattcagaagattattcacacctgtttctgaaaagcatcctgcatgatcaacaattcattttaaattgagttagcatcaattaacttgtattgaaaatgggtaatgatgatgtagaacatacatgaccagtgtgtgggatatttgactcatttcatgccatctttctcccttattttgcccaagacagacattgctaatcaatcacagtgccctttcatgtggacccaccatatagcccctgggtctttcttaacacaacatctctggtacataattgcaagtccatcaagatgaatatgttcagtaagaaataattagtcatttctgtcataacataacaatgggtgattcagatatcacttagaagtaagactttaatagactacttgttgtttcttaactccagggagtgagggcaccagcattactgtgtatttcccctcttctctctctgtcctttaggccagggctcgggaaactacccccgtttttgtgaataaaggtttactggacatagcccatagacacacctgttggtttatgtgttatctgtggctgcttttgtggtagaacagtgcattcaagactgtttgacctgccaagcctaaaagatttactaccttgccctttatagaaaaagttttctgactcctgccctgggcattttttatttatttatttatttttttgagacggagtctcactctgtcacccaggctggcatgccgtggctcactgcaacctccgcctcccgggttcaagcgattctcatccctcagcttcctgagtagctggaattacaggcgcctgccaccacacctggataatttttgtatttttagtagagaccaggtttcaccatgttggccagactggtcttgaactcctggcctcaatctgcccccacttggcttcccaaagtgctgggattagaggcgtgagccactgtgcccgcccgccaccccccaccccccaccccccaccccctcctgccctggactcttattttgacttttatacagggagaaaaccactccttcctgttggcacagagagccacgttagattcgcctatgcttgtcctctcctagactgggtaaaaccggtaggccttactacttacaaaacttcctctttataaaatgtacacgaacatgctatgtggccatgatggaaattttaaatcccagcacatcatgttaattcattacagagacagaacttctcaagcatactctgtaagcatgtgagcttgggataagttgcccttgggttcatgttagcctctctgagtctgtttcttcatctttcatatgagaatattaaatcccaattcttgtgtgtggctgctgagataatgttgctgtgaagattaaattacaaagggactaaaagtgcttttcctagtacctcatacatattaacagtccacacatcggccgagcgcagtggctcacgcctgtaatcccagcactttgggaggctgaggcgagcggatcacttgaggtcaggagttcgagaccagcctgaccaaaatggagaaacctcgtctttactaaaaatacaaaattagccaggtgtggtggcacatgtctgtaatcccagctactcaggaggctgagacaggagaatcacttgaacctgggaggtggaggttgcggtgagctgaaatcacaccattgcactccagcctgggcaacaagagcgaaactccatctcaaaataagtaaataaataaataaataaattaattaattaattaaataaaagtccacacatggtagttcttcttgaagcagcatgttttagtaaataagatgatggacttgttatgagctcagaacaagctcatatttgccatgtgtcttggggaaagattctccatttatgccttgggaaccctattgttatcagttagctacagctgtataacaaactacgctaaaacatggtcgtttctaacgctaagcatttactatggcttatgagtccataggtcagctgggcagttatgttgctctgggccaggatcagctggtggttgctgagcttgttcatgcctctgtgatcatctggtggtcagcttggggctggctcgattaggatggcctctcatgtcttgtggttggctggcttttggctggcacttgcctctcatcactcagtagccagttgagacttgttcatagggtggtggcaggggtggcacagcatcacttccttcaattatcttgcccatatcaagtcacaaagatggcccatcttcaggggatagaggcaccacaggatgggaggagaaaaatccaattgcaaagggcgtggatacagggatgaatggagaactgggaagaaaaaaatgttgtaattatctatcacattggccccttcaccaagatggtaaaaaatatactgttttcctttaatagaaagaagctattaaataaagcttttcattaggaagtttcgcatggcaaagtcaagctctcccctgccctgtcactcttgctctggctttggtcagcagagcctctgacatggcaggaggttaatttgggtcctgcctcccagggtttgtctcttgtgtgacagggtcagcaaaccttggggcctgttggctggttgcatatcggatttcttcctctgacattctcacaagttccacagcccttggattggtttatgaaggagccctcatgtcctccacttctcagacgtgtggaactccctgaggctgtgtctgcagattgccactgagaccacttgagaagtgagaatcgtgtctgctcagtgcattgtcttggcctctgggatcaaggcctcctgtccaacctgcccatatgatcacaatgcctgttctatttcagccagttgtttggatgaactgttgagatgtatgaggcatttaagagcttggctctggagtcaaatgcaatgtggaaatctggctcctttacatgcagatgtgaccttgggcaagatgctgacctcaagggacttcaggttttacatcaatagaataggagtaataacagtgcttatgatatggggctgcgaaaattgcatgggcttgagaagcaccttacctgtgtgtgtggaataagccctcactcaatgatagaggttattagcacgattatttttatgactctgaccccaccatatatgacgagtttcacctcttcaaaggagtctctattacctttttttaaggctgggaaggcttagttttagcacatccatgggttgtcacagagatgtcatttttgattcacacagggatgttccacattttgaatgggatagctggtcctcagcaaagggacactgccaagattcggaagagctgtgaacttgctgagtcgtggagaagcattcttggacacatagcctgactctgtttgtaattaatttgaatgcttccagagcttccttttataccctccctgttgtaattccatggggagttcatcgggccgaagctgcagttcagatcattgcgttcagtgctcattcttaccatctgggcttcatttgagtggagggcagttattttttaggtatctagttttttttttccccttgtgcagcatctgtgggtgtttgtaccgcagaaggaagcatgtaaataaatgcacttgatgaagaatcagtaagaatattaattcctaagctatcactcagtctatataaccatttgtaaaagagaaaaatgtcatttcacttatttagctgttcaagaattctaatatttctcattttataaggaaaagtagaagaaacaggttaggaagactaaacccaaagtatgacagtgctagaagaaacagaaattgttaagtaaatgctggagttgcatttcacattgcctcccacatggtgttttagagagataccaccccgatctacctgctggggaaaagtgtgtccttaacccaaagcttccaagtttgccaagacttgggggctgagggccagaaaccaaccaggagatagggtaccagggtaacctggagacaaccctcatcagatgcatgtggacacctctccaagccagtaacattttactaagcatgtttgataaattaggcttaaccaacagcacattgggtagagagaagaagggaggaaggcagaggaattctagaaggaaaatgagtgagttccatataatctgcaaaagaattccttctggcagtttatgaaacgagatgtttgatgaaagtaacattctaaccaggaccctgcaccttggcagcctgtcttctgtctctgggacttggggcatgtgggggatccaaggggtgggctcaggtgttcaggtttgggatggtgttgtggattgaattgtgtcccttaaaagaagatatgttggcgtcttagtcctaacccccagtaactcacaatgtgaccttatttagagataaggtttttacagaggtaattaagttaaaatgagtttattagtatcgtactaattcagcatgccaggtgtcctgataaaaaggggacatatgaacacagacatgcacacagggagcactccatgtgaagataaaggcagttgctgggaggctgtgcctgcaagatgaggaaaaccaaagcttagcagcaaaccatcagaagctggagagaggcatgaaacaaattctccctaacaacctcagaaggaaccagctttgctgacaccttgatctaggacttctagcctccagaactgtcagagaatacgtttccatggtttaagccaatcagtctgtggtagtttttgacagcatccctagcaaacgaatacagatggtgtcgtgataaaaggcgtggatcttctcactgcatcaccccactttcctgtttccaccatccccacagcctgggcagggaggaagagtggggtgaagagaggccattgacaaaatttggggatcaggcattcccaggtcctccaacatgaggttgggaaccgcttggcaacttagattcctgtgtttcaaataaacatccagaaataacatgatgagctcagatttctgcctcttatcttgtcatctagtttttctgtttataacaaaaatggtaatatgaaaagtacagttgtatgatgtgatttgttgagggagcgacacagttgcacagggtaatttgtgtgcagatcacatgttatccccaccacgatggaatgaaggaggtctcattgggccccttttgtgaagcagctgacttgtacaggaggcagtgacttgtacacagtgaatgatagaaccacagttcaagttcaggactcttgatttgcttgcatgtaagctcttccctcctacctgtaggatgagtgcaccaaggtctggctgggatggcccagagagttctgaaaatacagatgcctgaaccatccccagaggggctgaactaattggtctgggatgtggtctgggtagcgggagtttttgagtcttccaggtggatacccaccacagtaggcaaaccagcaaagcattttaggttgacagcagcctggagaggttagcttattcagaagttctcaggggcttgtgacaatccccgggaaagccattcctaaaatacagattcctgggacctgcccagacataacagatcagaatttccaggagtggagtccaggaatctgtattttacaaaaggcccagaggtcatctgaggatcacgtaggtttgggaactggacctagtccatccactgtgcctgtggggtgtgttctggagggattctaggcagtaaagcactctgttgttttcacttaaagcctgcgctgtaacaccttaccagaaacaaggtcatctgcttacttcacagattccaggggtaaatatagtgtcacactaggaaggactcaggactcaagacagagtaaacacttcttcactcagcaactgggcacagctcccagccacccaggaacgctaatttggcattaaacagagacttgcagaagtcccccaaatagcagcagtttcccatcctgtagacccacagaatacagcctttttgatatcctctgtctcagttcttcattctgcaaatgaagaagttgaagccaatgaaggtatgaccatctaatctctgtgacaggcagatcttggatgccctctgcaatgggcagctcctagtgccagctgctgtgtccttgtcattgtctctgtgtgtttctgaccctggactcatctggctgcaattcagtggccacatttgtagatacaatacctatttttgaagtatttttgaagagtaaatgagatagcattaaaagcactttaatagtttataaaatactagttgttgttattgttgaaatgtcagtttgcattagattgatatggaaacttaaggtggggcaccaactttgatttgtacctgtaagaatagtcatgtaacaatattgtttgtggatctggttcccttttgccagtctttaaaaaatttcctaatgcaatgccctattcagtgagttaagctaattatctatctgttctcctggagcttaaagccaagacagaaaatactggcagtggcaaagatgactgggccattggccagagtggatccattgataaatccatttttatgtcttgcccaagcactgtgggaaactggaacagaaccatgggacctatactctgccagtgttccaaaaatcaggtcctaggcattcatcatggcaaatttctgctgagttggccatgttaatctttggacagatcagatgtttaagatcatattcaattatacagcaatcatacattggaatatgggaaactcattataaattaggttgttgaatattgaaagacatgggaatttatttatgacaactgttttaggtgcaaaaagcaagctgcaacatggaaatgtatgtaccaaatgttaagaaggagtttctagtggaagaaggagtgtctttttattttcatctttgtatctcttggcattttttaaagaaatgccaattcttccagatgaaggtggcttgacggaagagataacgtcgaaggtgggtctttgatagatgtataagagtttgaaaaggcagaagcgccgggcacggtggcccacgcctgtaatcctagcactttgggaggctgaggcaggaggatcacgaggtgaggagattgagaccatcctggctaacatggtgaaaccccgtctctactaaaatacaaaatagttagctgggcgtggtggcaggtgcctgtagtcccagctactcgggaggctgaggcaggagaatggtgtgaacccaggaggcggagcttgcagtgagccgagatcatgccactgcactccagcctgggtgacagaacgagactccatctcaaaaaaaaaaaaaaagaaaaaagaaaaagaaaaagaaaaggcagaaaaatcatccagaggaatgagagtagcatttgtggaggcatggagtagtgaaatcccatagtttgttctggaactggctggctgttccagctggaccacattcagatggctgactggttatcaaggcaatgtaccactgagactgagagcagtttgtttgacccacacaacctgagtttgagtcttggctttaccatttcaattgtgtgaccttgggcaagtcagtttacatcacctactctatgtgttttcatgtgtaatatgtggataataaaaggaccaaggtatgggggaaggttaaatgaattaacacacgtgaagcaattagacccctcacctggagcatagtgagtgcttcataatttagtctatcgtatctcatcattacggcagatattgttttgcacccagtagaaatgtacagccttacttctctgagagttgaaggagaaaaaaaaaatggtgagttggaagtaatacttcatggagtacagggtctctgtggggctgtttggaattgtgcagacagagggaagacaggagggcattgccatgagagggtggcaccaagtgagagcaattcttctgagctcaagatttaaagccagttctagttggagcagaaagagggactggaaagtgttaggaaataatgttggatgcattcaatgaagccagattatagagggccttatggaccagttggtaggcgtctcactcataaaaaggaaaaggggactaggacatgatttttacaggtgatatacgcctggtggaaatgttacagcataaagggcctggactcggacttgttttctaaagccatcgggtgatatttcctgtggacctcacctgtagccagtaatgatctggaaatatttcagaccttagtaatagaccctggtttctgcacctagaaagaaccatggtggacttttcttctgaacattggtttctgacttggggaaagcagatgagtatctgtgaacacctcctccttcagtgaataaagagaacaatggtggatgatggaaagagcagtgaacatgttgcagccacaataaagtgtattgctaattcattttttaaaatgtgtttgtcttcttactttccttgattttttactaccacattatttttgaagtttaataatatggttgagatatatgactagctgggtttctagtggatatgatactctgtctctgagcagtacttgcgagcattctgaatcctagccttttacacctttagatagagtgaaaccataactacatatgtacatggcttggtcttgggttggggttcccaaagaaaagactctgagactagcatttaaattcagtagtttatttaggaggtagttgcaagaggcactggtagcagagtgggaagtgagacaggcaagggcaggaagccaaaaaagatgtgataataagtaagtcacttctgtggacaatggggattcaacccactcagtggcttgggaggcggggaggactgggacactgcagacagtataccacaggcttgtctcccaaaataggtgagaatactgtggagcatttatttaccaactcctgtctgctattggttgacgtttgcttctggagaaattaactccccagcactcctggcttctccacataatggatggagcctggtctgtggccagagaaagctcccagacaaggaagattgaatgccaagggaaaatgtgtagagcacctactactccacgtcacatggagggcttaacagtgaaagtaatggtgagaaactagatactttacccctaagatcagaaataaggcaaaaatgtccgttctcatcattcttatttgacatcatactggaagccctagacaatgtagtgagaccagaaaagcaaagaaaagacacactgatttggaagaaagaaataaactggttttgttcacagctgacacgattgcctgtagaacgtctcaaagaattgataaaaatctccaggaactaataagtaattataacaaggttgcaggatacaaagacacaggagttgattgctttcctatatgccaggaatggagaattagaagagtataattctaacaaaatatatacaagactgatatgaaaaaactgccaaactctgatgaaagaaatcaaaaaaagaactaaatggatattccatgttcatgaataggaagagtcagagtcaagttcttcccaacgtgttctatactttcaatgtaattgtagtaaaaatctcagtaatttattttgtggatatccacaaagtgatttctaaagtttatattgaaaggcaaaaggcccagaataaccaaaacaatactgaagaagaacaaaatcagaggactgacactatgagacttcaacactcactgtaaagctacggtaatcaagacaatgtggtattggtaaaagaaggactaatatccagaatctacaaagaactccaacaaatgagcaagaaaaaaacaaacaatcccatcaaaaagtgggctaaggacataaatagacatttctcaaaagaagatatacaaatggccaacaagcatttggaaaaatgctcaacatcactaattatcagggaaatgcaaatcaaaaccacaatgcaataccacctcactcctgcaggaatgaccataatcaagaataaaaaaagagtagacgttggcgtggatgtagtgaaaagggaacacttttacacggttggtgggaaggtaaaatagtaccaccactatggaaaacagtgtggagattccttaaaggactaaaagtagatttatcgtttgatccagcaatcccactactaggtatctacccagaggaagtcattatacaaaaaagatagttgtacatgcatgtttatagcagcacaatttgcaattgcaaaaatatgcacccagcccaaatgcccatcaatcaatgaataaagaaaactatatatatatatatatatatatatatatatatatatatatatatggtgtgtgtgtgtgtgtatatatatatatggtgtgtgtatatatatatggtgtatatatatggtatatatatatggtgtatatatatatatggtatatatatatggtgtatatgtatatatggtatatatatatggtgtatatatatatggtatatatatatggtgtatatatatatggtatatatatatggtgtatatatatatatggtatatatatatggtgtatatatatatggtatatatatggtgtatatatatgtggtgtatatatatggtatatatatggtgtatatatatggtatatatatggtgtgtgtatatatggtgtatatatacacacaccatataccatggaatactactcagccataaaaaggaatgaaataatggcataatgaaaaggaatgaataatggcataatggtattagctgcaacctgtgtggaattagagactattattcaaagtgaagtaactcaggaatggaaaagcaaacatcatatgttctcactcatatgtgggagctaagctatgaggatgcaaaggcataagaatgatacattggactttgggaactcaggggaaagggtgggagttgtcgagggataaaagactacacattggatacggtgtacactgctcgggtgatgggtgcacagaaatctcagaaatcaccactgaagaaattattcatgtaaccaaacaccacctgatccccaaaacctattgaaataaaaagtaataaaaaaagaaaagaagagtaattatataaagatcactgtttaaacacacaaacagtaaaagaataaacaaataggctaatagaacaggatagacagccccaaatttggaagcaaccaagatgtgcttcaacagatacataaataaactatggtacagacatacaatggaatgttattcagtgatatgaagaaatgagccatcaagccacaaaaagacatttaggaacttttaatgcatattgctcagcaaaagaagccaatttgaaagggttatatattgtatgattccaactatgtgacattttggaaaagataaaactgtacagacagtagaaagataagtagttgcttggggctccaggggtagggaggaaggagggataactaggtggagtgtagagggtttttaaggtggcaaaactattctcttatgatactgtaatgatggatacatgacattacatattttcaaaactcataaaatgtagaacatcaaaggctgaccctaatgttagccatgcacctcagttaataataatgtatcaatattggttaatcagttgttacaaatgtacctcaccaatgcaagatgttagtaataggggaaactggttatcgggggagcatttgggaactctgtacattctgttcagcttttcccaaaaccactctaaatttgttaagaccttattttaaggtctattgacaaatgacaagaaaaaaattatgtaaattggagttttaaaaattagtatttgtgattattaacttacaaaataaattggaacagaattcatggtttgcttgttaaaaaatgagttctgtttgaaagacaaaagggcgacattatagaaatggaaaatactgtgtttgaggttgtgcatggtgtagtggaaggccacagttcaggggctggtcactctgtgtttgagtcccctccagcccgtttctgagaagtactgggacttcaaattagttacaactaagcttcggacttcacatctgcaaagtgaggatagggagacctacttgatggggttgttgtgaaggtgaagagagaggaagtctgtcaaagcaattaaacaacacccggcatgtggagctctgtgcctcgccctgcttcgaaacctttcctggtgctgacctgaatgtttctctctgattcggtcaacagttgtgccatttttggctagtgatctgtggctgggctgccagccgatgacaggcagttccccaagcaggtcacaacaaggtggcaattgaccttgctccccgaggatgtctgttcgggttctgctagaagccaagggctccctgatgtggggtttcggtttcacactgtggcactctgaacaattctttatgggctggcaaaaggcgtttcacacttcagataggccccaggaggatgatttgctttcttcaaggagaactgagaattctcagatgattggaaggttctgtactctcattttagcacctccgatagattctcccacatgtggcaaacacagtcatagctggaggtccattgtcggttgttaacaggcagtgaactgttgctgaatcagacagtccacgtatagggcatttccatcatcacagaaagttctgttggtcagagcatctaaagcatattcggcctctccccctagccaccctgtttatctcttgcttgcattcctccttggtatttgtgctgctgccaccccagttccagcccccaatgcctaataacatcctgatagatcaatagagttgtgttttagcaggtctaacatcatgttgtatctctggcctctcaaatggcagagctactcctctgcttggtgcttaaggcctcatcagggccctgaccgcctgtgtcaccttacagtctccatcctccaggatatgccgaggagtgcatggagtgcacacacagactgcttgctgtttattgagtaagctttgtcagtctgtgctaggtctgtttcacaatccactctccatctgccctggtcaaactcttctccattgtgtatctgcttcttatatatcaccagagacaatttctccctcaggtaaacacctgaatacttcaggtttcccttccacgtgacacccagcatatcctgcttcatatgcaatttgtctgtctgcatcccccagccttgcttcttcctggagtgcttgttcctttaggaacaggtgctctaggccttcttctgtgtaggctagcccagcaatacataattaccaagcaatacatacttggtaaattgtaagatgctttttccaagatacaatttctaaatttcttctctaagaagttctttcctaaacttccataggaacaagccagcatacttgcattgactccacattgggagactacagaatcgctccctcaagcaatcctctctccttgcatcagtctcctgtctctgtgcctctagactaacattcagccacactagctgagtgtccccttctgcagactaggaggattgggttgtgtattagacactgtccatgcctagttcgtatctcttaggcgttactacttagtatgtattatcagagcctcccattgcctgaacctgaatctctttgcctgagggttctgggagacttctccaatccctaagaggaccacaccacctgcccctcaaagcagaccagaagttccaggagaatgaagacccctgagaaaagtccttgaccaagaactgatgagtcagtgtgtaaatatcccagttcccttgcctattcgatgggatggctctgaggtgcatgctctgtgtggttttctggaggcccccagcaggatggagcttcagttgcccacagcagtaactggcttgataaattactttgttgactcctttgttggctcctttattccctatccctttctcctcacatgtatctttgtcttaagctctacttctgaggaacccaaattcagattgaatgactcccaagtaatcttcctttccaactctctggctgctttggtttttatcatcctttgatttgctctggttggtgttttgcctacacaggttaccactgtgtggcatatgtttctaagcttcagatgaaattattgtttcactcatgtcacaagactaatccttgtaaatggcgtgtccaaccagggacccagcagggtgagacgcaaacctcgagagcacgggcaccgttggaggcctccaggagtcctggagaagacagtgcagagaagctcttggctgcagtagctctaccttaagccagggattactgagagttacccactctgctatttataaggactgaattcatagctagggagtttatatatgaataatgggaaataacttttttatgtgatatttcattttgttctgtagttggtaaaaagagcactttattaaaatagaatttggtagatgagatcaaagttaccttgaaaaattacttttacaaatttatttctgtctgagtttgctcctacttttcttaattctgactctcctattctttcttttcattcttctccttccttttctttctgcctctctttttatgatgactttttgtgctattgcatttaggaaacattaaggtattttctttttgaaatgcacatacacatggtatcatttaccagtttagcttttgaatctattggaagattctaaacaaaaagatatgtgttgctgtctctttgccactacgcctgccagacatcaatagtcaattgtagcatcattctcaatcttgagctccagggcaccatggtaattgatgggtatcagcataggagaggaaactgttatgatctaatggaaatgattagattaggtagaccaatgtaggcagatacttgatattcttttcctttcatttgtcctttgttaggagaaggagactgaatgattacttcagaagaagggaggttcttggacaaattcttgagttccatgggttgtgagtctgtcttgggtacagaccgtgctgtttctcatccatcttggagaactccaagaaagagtagaaccacaagctggatgttccactcacctctgtccaggccccagtggcagtttaattctcaatatggacagataggatgcttaccttttctctcctcctgtagactttatacatattaatgccctggctttccccatggcccagcctccattattgacattacctgtccttagatgctttgatgtttggctgtctttttgatggtggccaatggtccaggcccagggctggcctccatagggtctcttgggagggtgatagagaggagacagttccctatgtcaacaccttatctcagtcctccccagaaccttggccttgtcactgctgcagtctgaagttctcattttcccttcaggttgttggatttcctcatacacccaaacgtggggatcatctcccactcctaaatacttttgcaaagctgaagcttgttgttgctatttcctctctatttcaccttcacatcatcagcagacagtatcatcgcctgcctgtgggcttagctgcttttctctaggtctgaatgtgtgatgaaacaagagctcttccctctgactttgtgaccatctccctccccagcttctccttccctcttggccttatgtcctggcctgcgagtcaacttggagagcttttccaatttttgctgtggaacctaagttaagtgattaagcttcccatgggcccttgtgtgtccaacaacagggttagtaacgttttcctctcccagcctcccctaggactcctttcctggggtatctgtcagcatcttttatcgatagttggactggaggtttggctttgtcagctctcttctgaacactccccaaggcttcatgcacttcacctcagtttccaccaggtggttagtttgaagcaggctgaacacagtaatatccagagactccatgggtttgatcaaacacagaatgtgtagaaaatgccttcatctgggatgctttcacactccagtggttagagagcacagcttcaaaacaaaaagttagcctttgtgccattaatgcattgtgaaggaaatggtgcccctcaagttcctgggtgtcataggtggggctcctacaagcagagcctgaggtgaggactccggagcctgtgttttattgagggagagctctcaggggataccgatgaaggagggagagaagcaggacagggcaggggaggggctgcacagggaggatgagggggtagcagggcagctcagccttggcctgaaccattgtcggtgggaggggcggggagggggtagttctgtggcttaaattacacccaaagttgcctttcttgagtcaagggccttagcatttgtacttaaagtggtcggtcattgaaagcccccagggcagagtgggggtacagccttcgatgaggccctatccagggggccctattgatgaagggcagttctgcagagagtctcagctttagccctgcactcacagtagctggcactgcggtaccaaccactaagagagacctgggccagcaccaacggcagcaactacccaagccttcttggctcacgacaaaggaaactaacattattaacggctgctgtgagtaggtgcagtgtggagagcttctacacccatctcctcatttgattattgaaacagcccttaaacacgttattatttttcctgattttcaaatgaagactctgagcctcagggattcaggaacttcctaaggtctaaactgtaagcagaagagttggaatttgaactcagatccctctttcttggtttctcaccccaaagcccaagtccgcattgaaccttaaggttaaattgctgcctggaccagagacacttgtttcaacatgtgaagtctcagctgttggtggggaagagacattgtgtaggaatttcctgtacaatcatcttttaaagtctttaaggtcatcactcagggctatttgcttttattgtcatgtgtcttgtaccaacattttgtcaatgatggaccacttatgcaatggtggtcccataagattataatggagctgagaaaaccttatcaccgagtgacatcacagctgttgtaatgtcatagcataatgcattatcttttctatgttgagatacacttagatacacaaaatacttgccatggtgttccagttgcctggagtattcagtgcactgtcgtgctatacaggtttgtagcctaggagcaataggctatacctcatagcctaggtgtatagtaggctatactagctaggtttgtgtaagtatgctctatgatgttcgacaaccatgaaatcatcaaaagatgcatttttcagaacacgtcttcatcattaagtgatgcatgactgtatttatacagttgtaaatttagaagtcaaaacaaacttctatgtcagctccccaaacaagcccacagtagattcaaatcaccagtttggaaggtaggtcatctacaggcagggggaagctgaagatttgatatgaaaggagagacagtttaatcatagctatttaaaaaaaaatagtcttgggccattcagttagagaaagctgctgctttacactctttagtaggtgacaaatatgtcatcagattacatcctagaattaactggaatctgtttgctcatcttttttcaatagacttattgagtaccttcagtgtgtcagaaactgtgctagagatgcaagaactattaagacatgatccttgtgcataaagagcttgcatcttaaaagcttgaacacaaggaggctgcagaggaagacagagcaagcacctctcctgagcagagttctttatcacattagccagactaataaaaatgcatgacctgatacactcataaaaggatgttcaacatcattagtcactgggaaatgaaaattaaaattgccatgagatagtactgcactagagttgctcaagtttaaaagctgacaataccaagtcttgtcaaggatgtgaagactctggactctaatatatggttgatggacatgtaagatggtgcagctatcttggaaaacagtttggagtttcttataagacatatgaaccagccattccacccttaggtatttacccaagataaatgaaaatatatggttaccaaaaagatgttcacatgaatgtttatagcaattttattctaatagctccaaactagaaaaatccagatgtcctccaactggtaaatgaacagttagaggcacatccatgcaatggaaagctactcaatagtttcaaagaatgcacccctgaaacccacaaccgcatgaacggacctcacagacatcatactattcttgagctgaagctgcagtgtaaaaataaaattaagtttaaaaataattagaaataagtaatttgaaaacagaaaaaaataatttaaaaacatgccaaatgaaaggaaccagacacaaaagaatacatgctttgtgattctagttgtatgagagtctaggaaatgcaaacgaggcaataggagcagaaagcagctcagtaatgttatgggggtcaggtgcagggggttggcctacagaggaggacaagaaacttccagggatggcagaattgtacactttaagtggctgcagtttattttatgtaaattatacctcaataaaattcatttttcaaaaagcacctagaagcatgcccaacacatagcaaatggtcaataaatggtggacttcataaaaaatttgtgtatgtgtgtgtgtgtgtgtgtgtgtgtgtgtgtgtgtatgtgtgtatgacccagtaagctcatagaatgatgttcaacatcattagtcattaggaaatgaagattaaaactacatgagatcatgtagtactagtgcagtagtactgcactagagtggcttaagtttaaaagttgacaataccaagtcttctcaaggatgtgtagcaaccaggctctaatatatggttgatagaaatgtacgatggtacagctaccttggaaaacagtttggaattctcccaatgcatgctaggttcttgccagcctctcccctcagataagtcacttctcctcctttgggcagcagcaaggtacagaaacttcaagctcttccctgtaaggcaaaaatgccaactccaactcaccttcttggtggcctcttagcatcagagaaggctacttcctgacaaaagcaattgtgttctctgtttcatcttggcttccttatgacccctttcagacttatcaggactgtgtgccactcctcagactgggctgagtcaggaacccagccggctctccatgcctgtcctccacatggcatcagaagggaggaagctacatgtggttccaatcactgcattacagactcagcctttatgcccttcattgtgtttggtttggaggccccctcgcagactttatccactagctcggttcttatgttaaatttatgtctgggttcagaacacttcacatgataaccactgattaaaatccaaaaaatgagacagaaagaagacaggataagaaggatgacacattcgaaaataagtgatcttaattcctgggctcaacattctccatctgctaagataaacaagtgcaacttcctttgcctccttacattgtgatttgattcttctctctggcctctacctggagctgtaggacccccagggtgttagccactgacctgaccactggacccttggagaatccccagcccttctggaatgtgcagggatttctaactccatgacattttggtgaagaattttattttcaaaaacatagcataaaatagaacaacagcaggtatttccaacctatagtgaataaacaacctggtggtgaaggaatgtatatgcttctttatccgcacattagtggcaagatctggtagtgagcctaataactcctgtcagtttgaattgttgatgagcataaatgctattttgagatgcctgctacattgtaatgggctgtaaaatacctgactgccgttgatgataaagtcatggaaattgctaacactgtgtggtgtgctgcctacattcatattagaaggaactgctacatttgggttagaagttatttaaaaacatatgtattttgctcaattcactttagagaccccctaaattctacccatagtcacctagggggtctatagaccccaaattaagaacccttggaattaggaccaaactctgccacctgccaggtattctcactgagatgagtgacctgtcaccactcctgccaacagcatatgccacctcctaaattatttttaaaaagtgataaaacatttcagatacaaaaacatatagggagtaacataatgaatatccatatactcatcattcacctaagacataaactgtttgcaaatgtattttgaaatcccctgcagacttgtcactgcacacagtttcaatctgttcctttctcccaagggcaactactaactagaattgtcttttggattcctgtatgtatccttatgccttttccacaaatgtatgtacccatgaacaatgccaagtatcagctgcatgtttttaaactttgagtgaatgagattgtgctatgtgtattctcctgcaatgtgctttttcctcttgacattatttttgtgaggtttatctgtgtcgctgtatgggaccccagttcacttattctcaatttgcatggtgtcctatagtgtggctctaccacaggtaagctagctattttgttgttgattgacatttggattgtttccagttcttcacatgacagtactccacagaacattcttgtgggtgtctcctggtgggatgaatttgtctatcagtggaatggctggggaataaggtatgtgcatccttggtatctacaggttctaccaaactgttctccagcatgtttcttccgatagatttacactttgactagcaggggatgcaagttcctactgctctacatggtcatcagtacttcatattctcagactttgcattaataataataataataataataattcctgcagtctgatgatgtgaaatggtatttcaatgtggttttaatttgacttccctggttactggttataataatataaattgtgcccccaaagagagaaggtcctaatccctggaacctgtgaatattgctttggtaaattattttgcaggtgtggttcagttaaggatcttgaaatgaagagattatcttggattatctgggtgggccctaaatgtgatcacaagcatccttgtaagagagaggcagtgggagattagacacacaagaagatatgaaggtggaggcagagattggggtgatgcagtcacaagccaagggatgctggcagcccccagaagctgagacaggcaaggaacagattccttcttagagcttctggagggggcatggctctgctgacaccttcggtttggacttctggcctccagaactgtgagaggctacatttctgttgttttaagggacacagtttggggtaatttgttccggaagcctaggaagcaaattcatggatcaaattcagcttctgttcacaagtctattgggcatagggatggcctcttctgtggattgattattcatcaacattgcctattttttcttattaactgtaagagaacttgctgcattatggatattaattctttcttgttactatgttttgtccatggcttgtcttttctgtttttggtggtggtttttttatatacagaagttttaaactttaatgtagtcagtgtgccatttcttcttcttattgatttgtgtcaggtcttgattgaaaagtccttactgtcctgaaattggagatacatacatatcctgttattgtccgctaagtatctcctgctgtgttggggcatggccagcccttgcctcttgggtgagagaccccagctgggaaggggctgccttgcccttcagataatgggcaaagccatgcagatatcccagggaacctgctagagcacactggactgggagggggtgttggctctttcaaaccttaattttgccaaatggccatgctaatgattttgatattgagtttttgtagatatcgacttctctgttgctaacctgtgctttttaatcatcacttaccatttaccacttttcagttcagttaccaccaccgtaggtccaatgaaggcagatgtgccctccagctcagctatatgttgtcagggttgttttccctcctgctccaaggttgtcttcattttcacatagttaattatttgcagtgcctaaaattccagtcatgacagttttgtttagtattttcctgtcaaaaatccagattgcaggccatgacctggggtgcctttgggctgaggcaggtgatacatgagcaaggaggtgagtgagtgaccttagggacagctgcggagggcaggcccccgaggtctaagattggactcaacatccacccgcgccacatctgggccctgggctccttgctggatggcctgttatagacctccactatggaaactttggtctcattttgggaaaaaggagactagagcctctagcagaggaaatgacccctcttgatactttttgcaaccctgaccaagtcattaactgccctgcatctttcttgagctttcaaatgggattacagatgagtgtatttttaaggccccttccagcacctaaaaagtgtccagtgatacttaagaaatccaaaggtgtccagtttcacagacttatatcttccttttaagaaaacatggtgtaaagtatgcataatgtaaaatgtactatgttactcattttaaggtgtacgatttagtagtatttagtacattcacgttgctgtacaaccatcacagaacttttaccaccccaagggatattctgtatccgttagcagtcgctccccacttccccagttcccaggcccccggcagtcaccaatctgtgttccttctgtatggattagtctagattggatatttcatataaatggaatcatacaatttatggctttttgtgtctggcttatttcacttagtatcatgttttcagggttcatccattttgtagcatgtgtcagcacttcattcacttttataactgaatgatagtccactgtgtgcatatatcacattttgttaatccattcattcattggtggacatttgggtgtttccaccttatgcctatagtaaatagtgctactgtgaacatttgtgtacaggttttggtttgaacacctgaatttacttcttttaggtatattcccaggagtggaactgtggggcaatgtagtaattttatgattgatttgttgagggactgccaaactgttttccatgacagctgcgccatttgtgtttttcttgatgaactgtgtccccaattaaaaaaaaagttcttgttctttcaaatttcccatgtttatgattcctctgttcctaaaagaatccttaatttattcccacccagagattccaggaaatatttcctatgaatggcctgtgtagcttttcagtaccttctctccccactgaggagccatactgggggctgccccaaaagagagctgccaacccgtcacccatgtcatctgggtgcagagggtgagaagcagcccttccaggtccctgtgtgatgggaggtgggtaaagtcagggaaaatgagcatgtcctcaatctgggaaggatgttgatagagattgaggcacctccatagatttctatcctcccagtgacccctgcttctcaaggggcaagtccccagccccaggtgcctcagccacccttacagattgtaggtggttacccgacagtctacagagaaaaatatgtctcttttagcaggggtgggtgttctggctctgctttctgactgtttggagacaggactggtcctttggggatggcttagttagggtccaaaattgtttgggaggtaatcccaggaaacacccatagggagtgttaccactgaggacagcttgggctcagtttcgatgactaccctctgggagacagtgtagaaccctcagtgttgaggcactaataggtgaggaaggtggggtatttatcccccaaatctcatcctaccttggttgaggatcactcctgaggtctgtcagtccagtctacacatgtaaagtcttagcacactcctagggccagagaacatcctcaggcagaaagatgcaggaagccataggcatgaatggaaactggggagacctccaacagtgctaacaccgtgctaatagcaaagaggtgtgtaagaagaatttgacagatattgcccagaaatgatcagtatctatatcttgggttttgctgataccatcttatgtttgcagtcagacacgaatgagaaggtcttaacatctcaacatgtcagtgagtcaactgatcctgtcgatgtctgtacaagtcaacatgcaaaaatctcaacagccacatcttcaaatgcctccacatctgggcctgtgaatatctcaaaactttaacatgcaaatgacccaatatctcaacatgagaatgtccctacatcttaacatgtggatgtcacatcaacagctgaatctgtgaatgtcaacatttcagcatgtgaatacttcaacatttcaacatggggatgccacctgtgaataatatgccaacttctcaacatgaaaatgtctcagcatggaaattttatggcatctgaatctatggatacctcaaagcttcaatatgtaaatgtcttggtatcttaacatgtggatattacaacatctgaacctgtgaatgtctacacataacaacatgcaaatgttttgatgtctcaacatgtgattgtcaacatctcagcaatgtctagacatcacagcacatgtgacaacaccacaactccaaaaggttgagtgagccattatctttcttctcaatccaattcctcaaaaccctattgaagtactagcatgcagaaattttttttttttttttgagacggagtctcgctctgtcggccaggctggagtgcagtggcacaatctcggctcactgcaagctctgcctccagggttcacgccgttctcctgcctcagcctcccgagtagctgggactacaggtgcccgccaccatgcctggctaatttttttgtatttttagtagagacgggatttcaccgtgttagccaggatggtctcgatctcctgacctcgtgatccacctgccttggcctcccaaagtgctgggattacaggcgtgaaccactgcacccggccagaaattttaactcttgtagacattctgttcttttgcagatcagcactggctctcacatgtggaaagatatctgctaaagctttgcaacaatccatcagcactgcactacatttatatggaaatgaggctgctggatatctcagatgcttccagatctttgttgggaaaagaccaccctgagacccatccagtttcctgatagtggctttagaatccctctcacaatcccatccagatagttgcagataaaatgaggctacagattagaaacagaacctctgacacttgtaaagagacagttgactgcagagggaagaaaaggaaaagctgtagaaagtaggatcctaaggaagtgacagtgggattgactaggacaagccccaaggaacttcctgggacacagcaatactctttattttgatagagctttgggttacacaggtgcattccttgtcaaaactagattcagatcacttcagatttgtacattttattgtatgtttttgaattgtatctcagcagaaaaatactgtaaacaaatattgatatgatatgcttgctgaagtattcagggaaaagtgtgttgatgttggcaatatattttgaaatgtattttttaaaagattgatgggtgggtagttaaatatatttgtgaaaaaacaagtattttacaatgttgtcatagaatctaggtgctgggtaacattttttcaacttttatacatatcttaaaattttcctaataaaatattccaaaagaaaatctaggctgggaaaactaacaagttcagcctttgggggttgctctacccacatcacagactctgagaatgcctctcagtcgtatctcgttttcatgcctgatactcattaatgggctgggttatttttagaaatcttaagttctggttcatgtgtagtaaagacagcaaaaatgcatgtaattgcttctggaaattttccattaaaaataactgcattagaaaaaagtggattcttaattaggggtaagccttagatacttggaaaatcccacttaagtgaaatctcgcattctctggcaacatagacgcaggagatgttattttaattagcatttctagttagtgggtgatcccatcagcttacctttatcctggctttatcatttccagggcatttttacatgtatcacctcagagttttagagaaagggtttttgagctagagctgcctgagtttgaactctagtgtgaccacctgctgggtgtgtgaccgtgaagtcacttcttgatttgtttgagctcagcgctttttcgtgacaagtggaaatggtaatatctaaaacacaggcttcttataggaaataaataattcaggcaaagcagattaaagggcctgatcggccataggtacttaatgagatggtgttctcggcttcagttactttgatgcagtcaccatgacgtttctgtgaaggaggagaatgaatattggtttatcgtttcccagacgagatagccgatgtttggagaatttcagttacctgcagaccaccaaccatgtgggtctcccaaagtagaaggaggacttgaaccgacgtctcctgtgtcccctgctgtttctacttcagccatgctccctacacccccgagtctgatgggacagtcacacaaacagaataaggggtacaaagatgaactgagctggaatctccatgggtctcggggcaaaaataaggttgccttatgcttttgggtgtcacagaaagttttgttgaaaattattaatatccatgattgaacaatgaaaatgtagctgaaatcactcagcaaacttgctgtgccgttttcaaacacggttaagtatttgggcttcccatgtgtcgctgggaaagcttgacttagggctacaactgccaaaacgttgaaatcacaggataggaactgacaggtgttttcctggcctgtgagctccccaggtggagatgctccatgtttgcacgtcctgctgctcgtcactccatcccccgaggcccctcacttcccacctgacagcaagcactggtgaggaagattggggcatgggttgagtgcacaagcatggatcagtagggcaacaatggcctttcgaagggccgtgggcccttttgttccccttttttggccaaagctgtggagttcccacacaccacaaggaagaatagctgtattacttgccagaccattctcccaggacatcaaatctgcctcagacctggtcattggacagctttatgcagatatctaagttctaatgaagactttcccgtcttcttaagttcattatccagaattggccaccagccttattttagaataaaagaagaaaacacatatccattggaaaatcatgtcagctgtttgagtgctctatcaatgctgaaagggagagccctggagcccagcatgtgtctgctggggatgcccattcatggtgctctatggcaagagagagaccatgagaggaacaaaatacactcacaccaaccctgggagagacgctgtggccaaagaacacacaccctcgtgtggcttattgtttttagagcatgctagagaactacaacagactgtttggagccttaacaatcgcttattttgtattggatgttttaaaaaagcaaaggatttttttctttgtatgttacacgtatgccaggaaaaatagttcctgcagaatgaaaacaacatgagggccagtttgcaacttgagaggggccattgggtccaattgcaaagatgccattttctctgaagcaatgaggctgagtgtctgtggggagacagacttggtcaggcaggtgggcttgatgtcagatgattggctgtctttagggagggcccagtcagatcttcggtgggaactgcagatacagtaatgaccttgcccctggccagcaggaacatgggctcctgaaaaactggtttccagaacctaatgggaaacagagctgtgctgtcccacagcctggggtggtgggttttatcgtttccaagaggagatatctggtgtttggagaagttcagttacctgcagatcaccaaccgtgtgggtctcccaaagtagatggaggacttgaacccacgtttttgtatcccctgctgcttccacttcagccagccgcccccctcccctgagtctgatgggacagtcatgaaaacagaatgaggggaatgaggggtacaaagatggactgaactgggatctccgttgatctcagggcaaccttatttttgccctgagaccaacagattccagttcaggaataaggtgtccacacacggctctaggttcctcaagaacagttaacttttttttctttcttgagatagggtgtcactctgtcacccaggctggagggcagtggtgcagtcatgtttcactgcagcatcaaactcccgggctcagttgattctctacttcagcctcccgagtagctaggactacaggtgtgcaccatcatgcctggttaatttctgtattttttgtagacgtggggttttgccatgttgcccaggctggtctcaaactcctggactcaagctatcctcctgccttggtctcccaacatgctgggattacaggcatgagccaccgtacctggccaagagtggttaactttcaaagttcaccttgcctcagcatccccagggctgggttgggaaacccacccagacctcaggttttctctgggcagtgccattatctgcagggtcaagaaactaggccctaccagaaaagtaggcacggaggagcagcaggagaaatgaaaggaagaaagccagaaaagtaagttctaagaactaagtaagttcacccagggatgcatcaggcagcctccatgtggaccacagagaggggatccaagaaccttgtgcacatcatctgttgagaatgagaccctccccatggctactccatagagccatgcagctgtgccaggatgctctcccatgaggccttgcactttgtaccgttatacaaggagaaggatgctcacctactggccccttcagcttgactttccctcaagccaacttctggggtgataggaatccttaaagcagagtttctcaaagagagtttccaggaccaacagtgtcagcttcccctgggagaagcttgtgaaaaatgcacattctcaggccccaccccatacccagtgaatcaggaactctggaggtgggccccaggatctgagtttcccaagccctccaggtgagcctggttctagatacacagctgtagaggaaccacgatagctcctgcagaaaacagattgggtggggattccactgtggggcgtttctttaatctctttcacattctacactctttagcagagtttctatatgggaatgcattaggaacatgtgaggcagtgatctggctgataaggggcactaggggatttttttttgaagttgctatacagaaaagcacatggttattacttaaatgatatgttgtagatcaataaaaaatgataaaatgttgtaaatgatgcctttgttcacactttacgtaagagtgagtaaatgtctatggttcatttcaatggctatgactgttgtctgtggagggtagagctacctccagcctcactgcccccagcccatctctgaggctccatcattaacatatccaattgcaaaagtttcctactttctggttcaggacactgccctctgaaaataaagcctccccactaaaatccttttatttgatttctgatttttccctgacatgtgggtcctttattatctgttttttcttttctctgcctccaggcaaggactatatttaagccaattcaaacttcgcaagtcttaaaaataactctccctttgctaaccccttccaggtttggcaggggcttccctggaacaggaaatccatctctttctacctgcccaaccctcatgattaacttgccccatgatcttttcttactttttcaagctattatgctacaatttgacaaggtttttggtggtggtggtaggggagggtgggggtggagtcctgcttttccttccattgccaaggatcctgatttttaatggtgaagattcacttctgtaaaggcaaaacaggcattatggcccctcatgaatattcacaccttgaatgagttcatctttatctaattgttcctaaaagttatcccagccttctagaagtgaaagcaactatgactattttaaaaaacgacctttaaatgtcattgataattatctccagtgtgaattacttccatactgaaaggaggcctctgaagagttttctttttttgtagttctccatgtaatgggcttttgagcacatttgttagttctaatctctcatctcccactgcttcccatctatccctaatgaccagcccttaccctgacatgtttttctgtccccgaaaaccactgcagtaatcaaactcttcatcccctgaaggggcctcctacaaccatgcatctcccttcatgggacccttagtaaagatgagtgggaatctttgatcacagagggatctttggtaaaatcaagtttgctttattaaaaattaagaaaaaaaaataggggctgacaattgggccccatattgaggggagtgtgtcaacttgctgagaaatgaagcgtgcaaaatatttggaaggtaaaatatcagtaaaagaaggataagggtcaaatgatcttccattcccacctcccacccccagatctgcataccctgcacctgaccaccattcatgggtacacatggagacagcattctgggaagtcctcgagtggctcaaccccaagtgctctctactttgaaacagatgcaccaattggccagccctgatatccaaaagaacctattgtgatggcggaaatattctctgtcctattggtacaacagccacttgccaatgtgtgtactgagcacttggcatgtggctagtgtgacagaagaactgaattttgaattgtagttaatttaactttaattcacatttacatttaaatggccacatgtagctagtagctcccaagttggacagcacagaagtggacagaaggaagtggagttgcctgagcaatgtccactcttcctcagctaccagaaaattcctctggatagtggtcacaggagccgattggctccccaaagaggagttccttaccagttttaaatctggaagctgagggaggaaaagacaattgtttggcaaagaaacaaagataaccgaggcttgaaattttcactgaggtgaaacagagccttccttattaacaaacaggcttgggaaaaaacaaagcagagacgtaaaacaaacaaacaaaaaaagaagccctgcctttttttttttaaaccctgcttaggtatgaatcccagaaaactgtgagtgttcaagggctctccttgcctagaaaagaggtggcgtcacagttgtctaattagatgcccaggttctcagactagctgtggtctccctgccttctgtttaccgtctactaagccacaccttacttgggaaggtagaataaggtgggaatgagcattagttaatttcttccttgttggccaggttcatgagagggtctggtggggaggctcatgaaacatcccagacaaggtctggaggatctcagatagccctgggcccagttccacttggcattggtgcattggccgtgtttgtctgagaaagctagttctgttttggaatgatccttagtgatgatcaaccagcagccatcactggatgtctgctgagtaacagactccatgttttctgctatgagattcaaaagaaacatgatgtattagcagagagcataatctatagagttggaaagataaaatatactctcttggaatagatggtagtaaaggtagatattcaagtgttaatttcaggtagttattgaagtaaagaatagggctgtgagggtgtgtatgaatgtgagtgtgtgtgtgtgtgtgtccacgtgcatgcacatttagttaacatgttgggggcagttggtgggacagaacctagagggatgttgggcttcttttaaccttagaaacatcatggctggatggctggtgtcgctactgaagacaggacagtaattggaaatgagtaacactggcactttaagacgggcaaagtacagccagagagaacatggggcagacagagttaaaagcagcaaaccaagatcccaagactgccctgggaccctcgtgcccctactggcctggtcagttccattttactccccttgatggtggtgtcacttcatggtcctcctcagcacatgctgtcggccctgcatctccaccagcagcactgaccagcttggcttggcttcagagtctggtgtgtgccctctattcatactgttggctggcacctccagcagcaggccactgcattcaactgaggtctgggccttgcttctccttcctgcatgctcagggggcaccacccccattccatctgcagtctctggtacatctgcttcacctctctccctggggcaggcagccatgacaaccattggccccaatacccagcagtgtagccaaatgacgcattatttagacaagcatttaacaaacattacatctattctgaaacaaaaatggggtccgtggtatctcagcatccgggagaattttccagttctgacatatcaaaaggacacaggagccagcttgaagaagatcccactgaccaaagctgggacaatttgaacatcaaaataaataatgacaataacaggttataatccatagagtaaaataagaatctgtgggtccacatgtgaatgaatgaatgaacaagatgagaaaatgtcttcctttgagcagaagacatgatggaattagaaaaattaccatttgacaatcatcatcatcataattgtttcaagcaaaaattctaaactaacactaaaactagtggataaatgcttgataaataggatgtttacatagtttcaaactatatccccttaagatacttataaattgtaaaggaaaaagtagtaactttgcagtggaggaacctggccgcctcccctaaccaagtgcttgcagttagcgtcaccagtgaaggcacctgcattctgcctcctgatgaagggcagcacagtgtcctgtcaaaaatgcagagcctgactataattttgagaaatcatcaggcaaacccaaactgaggggcattctacaaaataactggtctgtagtcttccaaaatgtcaagggcatgaaagacaaagcaagatggaggaactgtcccagattaggggagacaaaggagataggatggttaagtgcaatgggggacttttgttgaatcctggaccacaattttttttacttttcttgtaaagacattaatgataatgaataatatgaataaagtctaacatagattagataatagtagtgttatccttgtgaatttccatttttttataatttcacagtgattatgaaatagaatgtcctgttctgagaaaatacactaaaatacttaggtatccttgtgaatttccattttttgataatttcacagtgattatgaaatagaatgtccttgttcttaggaaatacgctaaaatacttaggtatacaggggcacaatacctgtattggggcctcaaaggaactgtccagaatgatggaaatgctctgtgtctttttaaaatttttttttgtagagttgagagtttcactatgttacaaaaactggtctctaacttctgggctcaagcagtcctcccacttcggcctctcaaagtgctgaggttacaagcgtgagccactgcacccgactgaaatgttctgtatcttgactgggatgtgggttacaaggggattcacatttgttaaaactcattaaactgtgctggaaatctaagctttttcccatgtataaattgtgcctcaatgaaaagttaaattaaagcaaattaaattcttaaaaaaaaagataattccaaaatcgctgggtgcaaagccatggaagtggttgtaaatctgtccacagtggctactttgaaattccagagtatccctgatctaagcatattaattgtttttttgatgattcactactttctgctcacacatcatttccttcatagcatttcgcatcatgtggaacataaatgtttgtctgttgtttgataagtgatgtcattgactgtataatacatttcatcttatttgagacctgacagactggaatgacattcgtgttttcagggagaagcagatgacccaggtcagaactttcaggcacccacagcctctatgggaacatttcccaccctaagaaatgttcctgccatctaatgcatgaaagtggcaagcctcatggtcctatggcttgaagccagacagtccgtggattggagtatccatttaatggacaccagctggctccctgccttgttttgaaaaggttggagaatgtatttcttgctttttaaatcatgctcctgtgccaggaagcttctaaacactgtaatccctctgcctccaaatcaggtagagtaaaaatttcctgccaacctatcccagcaggagaaataggaggtttgagcacattgtcaggtctttcaactgaggactagagttcaggccaaggaaacaggttgaagacttcatcatgggagttctcacagtattgtggctctggttgctcaaggaaagaaacacaactctctggttagaccggctctgggctgtcagcagcctggtgggtcccggtggtggttctcatcctttagtgtaatattttgatcctcattggaagatgatgaaatggaggatcagagattttaactcactagaacctgagctttcttttctcttttccagggctcttgcctgtcttggtgtgggtcttcccagaagcagctcctgagcaaggatttgggtgcagtgcatccctctgggaggtgaatgaggacaggagctctgggggcaactgggctgaagtttgtcctccatgggattctggaaagcagtgtagaacaggcacctcagcatttcctccccaataggggagggagcagggtacatataggccaactgggaggtaggggaggatgctaattccaggcacttctgtccatcactcatttcagcaaagagatactaatgtctgtgtgtgagagtggagagggcaggccctgggagggtaaaggcccaggaggtctggggatcaccgagcagtctgctctgccactgtttaggtgtaggccctgtggtgtggaacagctgggagcactgagaaggaaatgagcaaagcattatggacaagaccccaagcctggccttggactaggatcacactgcctgggaaccagtggctgggaatacgcagttagttttctagctagttcctgaaaaagggatttgggtcccccaggttcctaccattggtaataaaccccaccaccccctacatacagggacaaaatccccacactctccatatggcggaaagcttttggctgtccatgttttttagtggtatatttccctaccttttttggggtgggaccccagacccagttctaatctcatatctggaccacctggccatgtgaagctgaggaaagtccttagactccctgtattctgcagcgtacaggtctattcaaacctaccccagagtctgaggaagctgataagctatgtaaaaaggctggcatacggatatggatccatatctcaggtgggtatgccagccttttcttcagcccatcagcttcctcagacttctctgtggaagtcatgtctgtgtctcaggcagcagtgaggcaagatggtaaatccctatgccatcatccccagaccagacccagggcttctatatcatagagaaaaagtatacatgccttggaagggatgtgtaggacaattgcttaagggcaggatttatggtaaggacatgctcttacacaaggaacagtaaataaactggaaaccttagaactgtggttgcttagaagtcaacatggtggattttcatccaagatggagttgctttagcttccatacctttggtccagaattcctcatgtgctatatctgtatttgtttggaatcttctaactcagggaaagaagcagaagttgagggaaggcaggaatgaatataaagagaccataaaggaatcatttcaagacaagtgaagcctcatgaggtacacaagaaagacaggaacatccacagctcactgatgctctcacttagcatctggctcagccacacccactttctgagggtaagggatgctcttgcaggacaaagagcaaattgaaaaacaggagaaaatggttcatgcgggaataaaggctgtgaccttgaccttattagcactatctgggagcaggctcagtgtgtcgttcaattgcttcctatgaaaatggtgaaacagaaaaaggaacaaatcaacaaacagactaaccaaaccttggagaagcttcctatgtgtttactaagaatcaaatcctgctggagtgagaaaactgggattcctttggccaagccctgctggtcaccttagttatgaagagtgatggagcgggaggaaagggtccccagggaaaaacagaaaacacaggaaaatgcccggctttccctccccgagctcagcaccactgagcaaaggacaccggtacaaccagcacatttcatccttctctgtggcggccagaattacagatttaatcaggtggcatcagaaggcaaatatatggacctgtctaatggaaagttcttctgatccacagtttcctgtggtggccccagggctggatgggaccaaaagtgaaatgaattgcacagaaagactcatgcctaacttagttaccaaaagagaaataaagaaagaaagaaattctttagttttgcgatttttttttttggcccatttttattaaggagagatcctggcaatgtcctctgtccaggggcttgcaggtgggatcctgtgcctgtctcactttgtctattcacaccgaagcttttaggtctggtttttgtttgttgctggtgtttagttcctgagagatgatccgatttctgcaacctaaattttccttcagcagaccccaggggaaatcaaggcctctctcggaggcccttccttgtcctgcccaggtccagccccatggtcacctcctctgcaaaggcagagccttggaatggtctgacgtcagggtgggaagttcttatggtcagggagacctggtggaacattcgagaacccttttctctaccttttggaggtcagagctgcccacatgctgcctgagcactcagcaggcagatccttgccatctccatgcctttttcaaggatgtttttgtctgggatgattcctaactcttgagggacactgagcccatggaggatctaattatagtggctatagattttgccactatatatatagatttatatattctgacttagattttgcacatattttgaggacagtctagcccaccctatagattcttagttcctggatcctaagttacggagattttgtccagactgatgtaggtgaggggagaaatttagtggaggaggagcttcagctgctgctatccatcattttcctggagtgggtgggcttctgaatttggaggcatctactaagagcatgacatgtttttaagccaaaacgaaatgaagctgagatcagcggtgggagcagggtgggcagggaggagtgtgtgtctatctacgaaccctagatccctggtaggttaatcacagcttctttcaggttttccttgaatgggttgaataactggatgaaggattccttatccaagtagttgtcacttggccactaatgtccatttttcacagcatcattttgtaacgtagcataggtacttgaatgccaaatgcctttgcttgagatccggtaaagaaagagcctcagatcggggaagcatagaggaatggtttatcctgtggtctaagggcaaagcaaggaatttccatcatgtttcaaaaatgggaaagtttcccagttcctctgcttacctgacccttagatataactcaaatatcaccaccatctcagtgacagggtgggccgtcactcctccacatgctcaagttgccatttctttctggtcttgcatgagtaaccataaccctgttaaaatgacaaatgttttccctgagctgggacaccggtgaagcaggctggatttgtgcccctgaaaattaggcagcctgcccgctaagtgctcagatgagcagaatactgactgttgaatgagcctcccctttgctgctcaattataagacatggggagactaagcctgcacaccttttctatctctcctggagttctgggcactggtgggctcccacccttccctgtgagtttatggtttaacagccctttgtaatatgcactgtcctttcacagcattacctgacttgattctcaccccaagcctgtggggtaggcatgaaggcactcttttctcaatgtgaagctcaggtatgggtcagagaagttaaaggatatgtctgaatcacagctctgatcagcagcagaacatggattcataggctctcatggccctgatcatattcttcacccattcttatcagggcatctgcattcttttgtcaaaggcctctctctggcctcctaagtgtagcttgccagcctttatggtagaccagaagtcagaggaatgaatgctttctggagccacccatagccgatgatgggagttggtgtataaataccccagctcccttaccccttgggcaaggtaacactgagtctgtgtttttatttttcccagagtttctgctagtaggaagccccaggtacacccagggataactgatgcaaccactcatgcctcattggctggtgtctcttcccagtatcacctcctcactccccagctggccctgcttcacctcacagatcaatcacctgtactgaaatccttgcctcagggtttgcttctgggagaacctacactataccccagattcctgggcaccaaatcctggcttttctcatcttctctctgggcgtaaaagttcgccaggctccttagggagaaggcaggctatgtcccgatgctcagaacaccctgtctcaatgctgtggtgcatagagtgtagttaaagttgatggtttttatttctttcttttactctgggagaaagaaaactcactggccctcccttatacactccatcatgaaccgcacggatcagcactgtgtttcttatcataaagagaacttggctgaaatggaggcggggcaggcagagacccaggaggaaaccccagtgtcagagctgctggcctgggaagacagatttgtcccagataggttaaagcgttcatggagtgactgcatttcttctgcacattgccttatgttatgtgagaggaggaagtgccatatcaaactccatgacagatgttgtaaatcttgggaagtgtgctgcggccatctctgcactgtggcttgcaaatgaagccatctgtcaaaccaggggccaggcgcccagccctcactcacctgggctgtgcctctggccaatggctgaggtgacctcccaggcatccatagtggagtatgtttctactttattgaacagccttgaaaatcagagaagctgaggaaaccatgtcaaaatttcctgagaaatttctctcctgcacttggtaaaggtgaactagaatttgccatgtgagtgaggaggacattttttaatgaggcaagagctccacaattcccacagctgctcagaaagttctcttgcgtgtcttgagagagactgaaataaagggaagtcgaggacagcctggctttgttctttgaaactacttatcaaagtaagatcatcctaacccaatatgagaagtatatgtgcaactgtgtgagtgtgtgtttgtgtgtgggggtacacactgaaagaaaataaataaggatgaaggaaagaggaaaacagaactgtttcatggaatacattgtgtaccccaattaatgcttcctatacttttattattttgtttgtaattttatttattattaatgaaactgccaacttgggaataacgttttaggtgctaggcgccacattcaataagaacccaaagagtgaaaggacaaatggagggctatcagtgttcaagatggcttcctgctggttgtcctggtgaagaacagtaacataaagggtaagagaaggattaatggaaactattgaacaaagtgaggcttccgagtcatctccagattgccttgtgcgctgctgtatctgtaccgtagcgtggataatcgtggcaggctatcgttctagccctgctgcgagacagattccaattcattatttcattccccagcatgagccagccaagggaaaaggatattcccagaaccagagtgttccaagttttctgaaaggtcattgccacttttttttttttttggtagctcccagcaaagcagaaacacttggaagtcaaccctgtccctttaacactgctgtgagctgactccatttgtctgagataaaacttccctcttgatccagtagcgttcacggctgagttggccacgagacagaggaccctgtgttcctaattatttctggatgaaaagtcctgcaggcgagtggagattcggggcaaagacggccaggtggagccgtcaccagcgagcagtggattgtagaaatggagagataattaaattaaaagtgccaggtgcaggcattgaaaaataaccctgggtgttaattatgcagttcagtgttagcagaggaaatgccaccggcctgtccatcacgtggcagttgaaaagcttgggaaagacacattcatggtttctagagaatttgccagggctgcctacttgggattctggtgaagcagagattatttattagttggagtgtgtacatttcccccattttccactcagccaagttgggcatttggtgggtacttggtgtgtgggggattaactttgatccacatgaaaatttgaacgttggagtgtgtcacttccaatttaggcacttaggagtatttcttctctttctgatttgaaatgaatttgattttaggggtcagaggtagtgtgtccctgtcatgaagatggaaggataaatggtggcgtgttcagacaatggaatagagcacagtaatcaaaaggaggggaccccagtagcataatagcagcatgactgtgttacaagcacagttgaatgaatgaaagaagccagacctcaagacccattctgcatgaatttattttggtgacgttctagaacaggttaaactaagctatggaggtggatgtcaggtctgtggctgcatcagggaacttttggggtaatggggtaactttcttgggctgaagggcacatgaatgtaaacatttttcaaaatctgttgaatgcacgcttaaaatctgtgcatattcttgcatggaaattatccctcaatgaaaggaatgtgaaaagatcttcccatgttttgtccttccatggattttgaaccctggtcagtcagttcatttcaaaaggtgataaggattaatctgtttgtggtccttcctgaccacccagccttttcctgttcacagacctgttcagaaaaggctttcattccaaggaagcagaatggaaaacagggtggcccactacagcctttgggccaaatctgctcaatcacatttttgtaagtaaagttgtattgggacacagccacatggccagtcatttatgtgtcttctgtggctgctttcatgccacagtgacagccgaggagcttttacagagactgatccaccacctaaagtgtttactctctatccctttacagaaaaggtttcctggcccttggtctaaacattcatttctttttggaacttctcccttcagatctgtgtgggtggaggttttggatggagagtgctctccaggaacgagaaccctgtagagccaggtacttaggttgagcatggtcacaatttggataagctatccttcatcccatggagttcactgggcatgcgtgctgtcacagatctacaacagtgcacagagcttggcctacgtagaggtttttttaaaaaaaaaaaataaagttatccaggccactgtaaagagaagaggaataaataaggcctggaagccatcagtggacaaagctagactcctgttttaaactccaagctactggctataaattagtcctgcatggaaaataaaactaagctaactgattttgataaaagtaaatgtgatctggttgaattgggtccacatggttggcaatgtttgttaagtcaatgaaggaacaaattgaactgatgtaacaattcagttttgaatttggggctaaatgagccattctgttgaagacaccctgtgctgctgttttcttcagtaagatttaagcctcccttctttcctttaccttccacccaagatgaatgcacgtgatcaagcaggaagtctctggaggatttgctaacgagacacacaggtccccaaagctcagtctttcttcattttgcaagtatgtatttccttcatctgtctgttttctcattccacagttactggaattaaagagttagatcttggggaaaagcaatcaatagcttttttaatgaaaggggacaaatgcaattggtatcacctaaggcttgagaagtagatctctactttctttaaaaaaagctcaaaaaaaaaaaaaaggatgcagtgggggtaattatagaccccaagagtccacctaactggggagttttaaaaagtcaagggaatgtcttgtattatattggactgttccttaatgactccaggttacagtggctgtgagcagatgaggaataattgttagaaatggaaaattaccatttaaccaagaggatttccaaaacaagcagatgaaccatgagcggtaaaaatgtgctctacggaatgtgattattgctgatttcatcatatgtcctgggcatcttgggtgagaattcactcatttactccgtcacatatgttcagagcctcccctaagtctggcactgtactaggagctgggggcacccttttgagaaccacccatgtgtttctgccttcagggatcttcactctggagtggggtggtagaggtggagaataattggagataaggctggaaggccaagatgccagccacgtgggatcagggttttgctgagttttttatttaagcctgtggtcagtggggtgccattttttttactgttttaggaatgagggggtttgataagcccgagtctcaccagatttgtagtgaatctgagctggatcatgttgttatttgtgctgccagtgatcctggggaaggactgtccatgggccatggtgacctgtgctcacaggtgcacacccccagttacctttgtaaccagaaattagtcaggggttggcagaattaagccagtggctgcttccactgcataatagtataaaaaatgattaaatctctatacaagcctcccctcctccctccaggccactgtatcttacaacaacaacaatgacaaacaccacaccattatctgattttcccccttctagcttgtttcatctatggatttgggattgaaggagaatatgattgtccatattttcatcaaatgtaaagtatttgttctatacgtattcttatagaattgctaaaataaacctatgacccagacataggctggctagcattgtctatgcattcattcatttagtaactcatatatatgaagcacattgctgtatggcaaataccctacttggtgcttgggaataaacagtgaacaaaagtgaacccagttcctgcctacagggaacttacaataatggaggcaggtaataatcaaataatattcaaatttatgcttgcaagtttagaaaaggtttgtaagtgatgcaatatgatgagatggcacaacaggtctaggggtcaggagaggttttgcagagaagaaagtgacactgggtctggaatctacaggaagcgtattgaccaggtgaaggttgcgggaaggcctgttggtgcaaagaagcagggcacattagaggaattgaaagaagactgcagagaatcagaaaaggagagtgcggtgtgagacagggctggagacactggcagagacccggcaatactagtccttgtgggttgtgctaaggaggccgggcctgatttcaagaacagcaggaggctgctgcagtgctttaataagggtggatttacatttggaagatgcacatttggatttacattttggaaaggtctctctggctgctgagctgctgtggactggaagggggaagattcaacctccgatgatggctttctgctgatttgttttccttctttcacttttcttctgggtttgggggctcttggctgatttagtctctactagcctctgaggaaaagcactggtcctggggtatttattaaaggaagcatgatggattattttggagggatattctttgaaatctggagtgagagggggtaccatatgccagcagcaatgggcaaaatggtgctaagaggtaaactgatgtccaaaatgattccatccaccaaccttggacatgagagtgaagttcctatttcataaatggaaatataaacctagtttatcctttgacatccagaataatgtgtaagaagttttccttggcagcaaatcttaaatgatggagccttggggaatgacttctgaccctttataataattagccaggccaggacacataggtaagacacctggtgaccaacagcctaagggtcagggggcaaagggtggtaggacaatataagagtgcttaactcagtgtcctgcatagatggtagctattagcataatgactatcactaatatacacaccactattaccaacagaagtgtcctatattgctctctcatcttttaaaatatttattcatttattcattcaattcattgtttcagtgaatgtttattgaacacccacaatactatgcattgttatgggaggtggggactcaacagtgtcaaaaactaagttccagccaccatggagcttacattctggttgggagaggagaataaacaaataaaattaaataaaggaatgcattgtctggcagacggtaataagagctgagaagagaaacacaaagcaggataaagagatggagaatgatggataagatgatctgggaggccctctttgaagaggcactgtgagccaagctctgaatagagggattgaactatgcagatgactggaaagatggaacagcaggtgcaaaggccccacagcagaagacgcttgcaggatttgagaaggggtgccctccactgtgtgcccagagcttctgttattctataactactaaccttagtaacaggagtgacccctcttccaggagaaggagatgagcagctctgatagagtagcatccgctttcaattttctttctttatttcttaaggctcttattccaacctcccaactacggtttcagcacaagttaggtgagcagctatttatgtactaggtgaaggttcccagaataaatgtcttgagattttaagcaaggtgtagtattatcgtatgtctcttctgacaattttccaggttgacaaaaatctgcgtttgtctagcaacatggtgactggaggggcaggcaggcattctgttcagcatggaacagaaataagcagtgggagctgatgtgctgaagtagcaactgaaggaaatacagctttggataaaatggagccactcaaatggcatttgaaatgtctgctctgaattcgacagatgatgttctctgccaccggcatcctttccgatatttaatgcagacgtttgccacgtgtcagttctcagctggggactaggaagcattcttcagggtgtcagcgtcttgataaacatgtcaccaatttgtatgattcactacacatgaataaatgctaggaatttggctgatcaattcatatgccagggcctacaaatgtggaggaaaatcgcacttcttatctgtgggcggaaatgcaaaaaccagcgtgatagtgcacaatgcatgatctgagtgtgtgaaaagttttagagactcgattactgttgatgatgatgatctgagtaattgaagctgtatcagaattagtctaatttactgcagtgggaggaagaaaaaaaaatatttatttttatactcatgagaatcatagtgattgaaattaagcaatttcctcatctttttaaaagacaacctagagacgctgttatctttgttccaggggccttgcggctggcagacatgcaatgtgaatttacttgtccttcctgatttgggagctgctcaagccctgggtgtaacgagcatctgtctctctgcttggctcctgtctctctggctgtgccaggcaacaccaaaacccccagagggcattaagactggataaccaaactgcacaaatgtgagagaagagaacaaggtttaattacagcttcccttcattgcctgtcttctcccaccccaaaattaatttgtaaacaaacatggcatattggggtttgaagaggattcaagcaggaggttgtttggttgtagccaggatagatgatggggctgcagtgtgctccgatatattcactcaagtctggccgccccatgtctctacggcaaagcctgcaaaattgtgagcattcaactctgtacaattacccctgactcagctgccaaaacgtattttccatccatttttgacagaggcttctgtttaagtagagagaagaggagagatgatctcttttaaaagtgattccagtctgattctcgaagtgcaagtggtaaagtcaccaagcctaattggaatgaattgatttatcctctttggcagccctgatcagtaccctctcaagagactggactacatatgggaggtaatcatgatgatatacatatttctttggatgctgcttggctcatccagtccattttccatagatattatcacttaagacagctgctattctatcactggtcttggattttttatttaatcccgtacttcaaaaagagaaatctgttggctttttgaatgcagaagaattgccagaaaagataggggagacaaactgtttcctttaacagtcttctatggaagttaagttttttttttcccactacccccaggcaaaaaccgaatgaccatttatcctgtgaaatgtcctgaagctacatgtagtatacacatagtaatcatctgtgtactcctgcctatgttctgtgttcatccatcagacccatcaagccttgagttgtccttctgcctgtcgtgcttgaccctgagaggactgaggaatgtggggttgggggctcagcctcttaattgccatggtgtgtgatttatctgttccacttttgtcttggtcagttggggctgctataacaaaatgccatagactgggtggcttataaacaacagaaatttctttctcacagttctggagtctgagatcaaggtgctggagattcagttccccatgaggcttgcagacaggcttcttctgactgagtccccagatgggagaggcaagggagactgtcttctgtctccgcttataaaggcactgattccatcatgagcatgccaccctcttaacctaattacctcccaaacgcccatctcctaacaccatcaccttggggattagcgattcaattgtgaatttggggaggacacaaacattcagtccatagcagcttttatttttatcttttgctattctttttattttggaataactttatttctctagctttatcaaggcataattggcaaacaaaattatatatgtttaaggtgtacaatatgatgtattcactttcataaacattgtgaaataattaccacagttaagataatttaagatattcactgcctcacatagttagcatttttgtttcatgttaataatatttaacagctactctcttatcaaatttcaattatacaatacagtattattaactatagtcatcatgctatacgttaaatctccagaacttattcatcctgcgtaactgaaactttgtgctctctgaacaacatctcaacatctcctttgcctcctagctcctggtaaccaccattctacttgctgcttccaggagcttgacttttttagattccacatataagtcatatcatttgggtttgtctttctgagcttggcttatttcacttagcataatgcccagtaggttcacccatgttttagcaaacaaagaatttccttcttttttaaggctgaatagtattccattgtgtatatataccaccttttctttacctattcatctgtaggtagatggacacttaggttgattcagaatcttggctattgtgaatactgctgcaatgaacatgggagtgcagatatctcttcaacatactgatttcatttcctttggatacataccccaaaatgggatgtgagaatcataaagcagttctcattttaattctctgaagaatcatcatactcttttccataatggtggtactaattatatcgccaccaaaagtgtagaagagtttctttttctccacatccttgccaacacttgttttcttttgtctttttgtgaataatcatcctaataggtgtgaggtactatctcttagtttgcgtttctctgatgattagacatttttcttgtatacctgctggccatttttatcaggacccttgatcattttttaatcaggttatttgttttcttgctgtgaaattgtttgagttccttatccattctagatattaatgccttatcagatgtatggcttgcaaatattttttctcatttcttaggttgcctcttcactctgttgattgtttcctttactgggcagaagggttttagttatgatgcaatcccatttgtctgtatttactattgttgcctataattttggggtcatacccaaaaaaccaaaatcattgtccagacctatgtcaagaagctttcactctatattttcttctagtagttttaaaacagtttcagcccttatggtaagtttttaattaatttagaattgatttttgtatatggtgtgagataatggtccaatttcattattaagcatgtttccctaatgccatttattgaagagactgttctttccccgttgtgtgttcttggtactttgttgaagatcaatcaactgtaaatgcatgaattaatttctgggctttttgttctgttccattgacctgtgtgtctgtttttatgccagtgccttgctcttttgcttattggagctttgaagtcaggtggcgtgatgcctccagctttgttctttttgctcaagattgctttggctattcaaagtccttgtggtttcatatgaattttaaaattggcttttttttttttttctgagacagggtctcactatgtcacccaggttggattgcagtgttgcagtcatagctcattgcagcctcaacctcctgggctcaaatgatcctcttacctcagccttgcaagtagctgggactagaggcacacaccaccatgccaggatcttatttttgtagagacaaagtctcaaactgtgttgcccaggctggtctcaaactcctgagctcaagcagtcctcctacttcagccttccaaactgttgggattacaggcatgagccaccacctggcctatttttctatttctgtgaaaaataccattggaattttgatagggattacattgaatctgtagatcactttggctagcatggacattttaacagtattcattcttccaatgcatgaacacaggatatctttccatttatgtgtgtatttttcatttttttcagcagtgcttcatactttctagtgtgtggactttttctctcttaggttaaatttattcgaagtattttggtttggtgctactgtaaatattataagattgttttcttggtttctttctcagatagtttgttgttaatggacagaaactgctgattttttgtatgttgattttgtattctgaaactttactgaatttatttatcagttctaacagggttttttggtgtagtgtttagagttttctgtatctaaaatcatggcatctgcaaacagagacaatttaacttcttctttttcaatttgtatgcctttttatttcttatctggttgctctagctagaactcccagtactatattgagtagaagtggtgagagtgggcatccttgccttgtaatagctcttagagtataagctttccatttttcccattgattgtgaggttagctgtgggtttctcataagtgatctttgttatgttgaggaaattttgctctatacctaattttctgggagtttttattatgaaaggatgccagactttgtcaaatgctttttggcatctattgagatgatcatgtggtttttatttttcattctattaacgtgatttgtcatgttaattgatttgcatttggttaaccaaacttgtatagcagagataaatcccacttggtcatattacataatctttttgatgtgttgttggatttagcttgatagtattttattgaggatttttgcatctatgctcatcagatatattggcctgtagtattctttcttgtgatgtctttgcctttggaggaatttaaggaggattggtattcattcttctttaaatgtttgttaaagttcacccatgaagctacctggatctgggcttttctttattgggaattttttgattactgattcaatctccttactcgttattggtctgttgagattttctatttcttcataatttagtgttgttagattgtatgtttctaggaatttatccatttattctaggttatccaatttgttgttacataattgttcactgtagtctcttatgatccttagtatttctgtagaatctattgtaatgtttcctcttttatttataattttgtttatttgaatcttctttcttttttctttagttatgatttgtcaattttatttatctttttgaaaaaccagctttttgttttatgtatctttttattgcttttttctctatttcatttatttctgctctgattttacttttcctttcttctgctgactttgggcttcattctttttttctaattccctgatgtgtaaagttagtctatttgagatctttctttctgcttatgtaggcatttatcactataaacatccctcttaaaactgcttttactgcatcacataatttttggtatgttgtgtttccaacttcatttgtctcaagatattttttaattttctttttgatttcttctttgagcaattggttgttcagaagtgtgctgtttaattccacatatttgtgaattttccattttttcctgtttttgaatttctggtttcataccattgtggttggaaaagacacttgatatgatttcagtcttcttgaatttgttaagacttgttttgtggcctaacatgatctatcccgggaaacatttcttgtgtgcttgaaaagaatgtgtattctgctgctgttggatggaatgttctgtatatgtctggtagggccatttggtttatagtattatttaagtctgctgtttcattattgattttcagtctggataatctatcctttgttgaaagtagagtattgaagtcctctactattattgtttttaatttttttaatttttaatttttgtgtgttcatagtggtatatatatctatggggtacaagagatgttttgatacaggtatgcaatgcataataatctcatcatggagaatggggtatccatcccctcaagcttttatcctttgtattactcttaatctaattacgctgttagttattttaaaatgtacaattaagttattattgactgtagtcaccctgttgtactataaaatagtaggtcttctttattttttctaactatccctactattgtattgctttctatttctccatttacttctgttaatatttgcttcatatatttaggtgttctggtgttggatgtaaatgtatttaaaattgctgtatcttcttcatgtcttcatgaatttaccccctttatcattatataatgaccttttttgtctcttgtgacagtttttaacttaaattctattttgtctgatataagtatagctatcctcagcctggtgcggtggctcacgcctgtaatcccagcactttgggaggccaaggcaggtggatcaccgggtcaggagatgaagaccatcctggctaacacggtgaaaccccatctctactagaaatacaaaaaattagccgggcgtggtggtgggtgcctgtagtcccagctactcgggaagctgagggcaggagaatggtgtgaacccgggagatggagcttgcagtgagccgagattgggccactgtaaataaatatagctatcctctcttgcttgtttttagttcctatttgcatggaatttctttttccatcttttcactttcagcctatgcgtgttcttaaaactaaagtgaatcttttgtagttagcatatggtcagctcttgtttttttaatccattcagtcttttaattggataatttcagccatttatatctaaagtactatcattttaaaattgttttgtggctcttttgccgttcctttattcaattcttccaatcttgctgtcttcctttgtgatttgattatttttgtagtgatgcgctttgattcttttctctttatcttttgtgatttatctttattgttaccatgaagcttacataaaacatcttatagttattgcagtatattttaatctgataacagcttaccattcattacatacaaaaactctccattttaacttctcttccccccaaactttgtgttattaatgtcataatttatatcttttatatatccttattaaattattgtatatatagttatttttaatacttttgtcttttaactgttacactggaactaaaagtgatttatacaccactagtacaatattagaatactctcaatttgactatattcttacctttaaattgagttttatacttttacatgctttcatgttagtattcttttgtttctacttgaagaactccctttagtatttcttataatacaaatctagtgatgattaactctcataccttttgtctgtcagggaaagtccttatctctccttaatttctgaaggacagtcttgcaggttataatattcttggttagcagggttttgttttttttttcttcttcaatactttgaatatatcactgtactctttcctgacctccaaagtttctggtgagaaatcttctgatagtctaacagacattcccttgtgagtggcaatttgcttttctcttactgctttcaaaattattactttttgtctttgacttttgagaattgtattataattgtgtctcaatgaagatctctttatctttaatatatttggggctctttggaatttatatatctgaatattaacttccctttccagatttggaagatttcctgtcattatttgtttaatatgcttttagcctcttgctctttctgtgttccttccagaactttcttattggtatgcttgattgtgttccataaatcccatatcctttcttcactctttaaatttttggtggtgttgttgttgttctgactgggtaatctcaaatgacctttctttaagctcgatgattctttcttctgtttgattgagtttgttgtgaaaaaactttcagttcagtcattgtgttctttagctccagaatttttgttgtttcctttttatggtttctagctctttgttgaacttaccattttggttttttgtttcctgatttttatttagttgtctgttatctcttgcagctcactgagtttctttaagattattattttgaattctttggccaggcagtttataaatttctatattttgaggtcagctaatgtttttcatttcgtttctttgttggtgtcatgtttccctgattatttgtgatccttgtggccatgtgttggtatctgcccatttggaaaagcccttcaccagtcagctgatccagagatgctcaatggaccatctggtgtggtccatgggtgggcttgccactaaagtccttggtaggcttgcctggtgcctcattcatcagttcaccaggcctggtgcctgggtccacaggggctggcttggaggctaggtccatgtgtctggcctgtagtataggaccatgaagaatggcctggcactggggcaggcctggaggctgggtccacagaggtctacccagtgtgatgatctacagggcagaattaaatgctgagtttgctggaccatggagctgtggggagtgacctgttgcttggagtcacagggactggctggacctggagcctacatttgctgaatttcctgtatcagctataattgctgaatttccaacatgggaatttccagcataggcctggcagggaggctgcatctacaggtattggcctggtgcctgaggccaaagggactgacactgagcctggggaggcctggagactgggtctgcaggtgcagatttgtagctcggggctgcagaggccagccttgcactaggtggtcctgaattctgaggctgcaggggcttgcctggaagtgtagcaggtctgagggctgagactttgggagccagactatagccttgggctctggaggctggcctggcaccagtgtgggcttaaagcccagggttgcaaagccaccctggtgctagggcaggtctgagatcagcggctttgggaccatcctgggaccagaacatcttgtcatcactgctcacgtggcatttaacccaagctgtcttgttctggtgtttaacagattcaaggaagcctttttatccctaaccccactaacacccttggctccttaggttaggcctcatgagaattctctttttttatttcccaaggctactagccaagctctgggccatagtgaaccaccagtagtgtcttgatgacttcttgatgactgagtaactatgggtgaatgaatgtatctcatagtccctgagtgtgagtctagatgtgtgttactgaggaatgtagaggagtttctggtctgagggtaggcttttcagatctccaaggtgaagcatcctgtagctcagtttttcttgagggcacaaatacaaaatctaaaccagtggatctcagactggtgtcccatatccagcaggccacatcacttaggaacttgggaatgcaaattctcagggcccatctagacttcctgaatcagaacctctggggtgaggccatgcagtgtatgctataactagcctccagggaatttggaggcactctcaagtgcaagaaccactggcccagaacactgcatttttagctatgctgccagagggagcatagtctttgggagtcttcagtctttgggacgggccttggctgaccccaagagagtttacacagcctctatgtctggaaaagtctcacagaaaaatgcagaggtttttccttagctaagaagactgactcctctggcctcttgaggcttgtgtctataaagagacattctggagacttggcttctgtccctgctacattgactttttgtcagcaggcaggtagcaagcagtgtctccgaatcttgtgcctggagaagggaacaaatgttctgggtacagatgacccttcgcttattgtccatcttcctttcagaaatctaacttcatgagaccagtgatagagtcctgctgtttgcctaggtgtcgggggcacacagtaggtatacaattaatgtttgttgatttaaaaaaagaaaggtccttggagcatagatgtttagaggtcaggtgaggaattaagatttatatcttaacagtttcctgagcctgagttgtaattctaaggggtaaacaaacaacagttacatctgaaggtcccttgtattgggccctctgatcacctgtgggtacaggtgggcagaagggtggtcacggagggacataattcattcaaatgccttagtctgcctcaaatgcctcaaagcacatggattccagcatgttctattagcgtttcttgagagtggaggatataggaaccttctcagtgtttaaagttttagagaagacttatggagtgatgagaaatgttccagcatagctcccagggctgggcctggatacttctagcttggctgtgagctttgctgtggcttcttcagctgtttgtgggagagtgctgaccaagcaagatttctctcaataagaactagaaccaaatacaaaactgaggatgtgccctggctcccatggtaatgatattgtaagattattttatgtgccgttgagattgatgatctcctgtttgccaggcaatggtcctcctgttaccctagctggatgacagcattaagccagagtgaaagtgtatcaaccattgacctgtaacatacagatctgtcatgcatcttcatttcagatgacaaatgtgagtatgacatgtgggtaaatctttaccagagaatagaccaccacaaaggcaggtgatcatatgtttagtttgctgacagtaattgagtgagcctttcccttcttgcaaggaaaggagaacttgcagtcaaaaggggaaagatcctctcttatcttgtccatctttatggccagaacaaaaatatacctcacttcctgtctatctcttatctctgatcacacctggttatcctcaagcagagagtacatttttcagtgaagtagttcaatcatgatctggccaacaaattattgtttgttaaataacttttaatctgattattaaaaatatgcataatctcttacagaaaacttatgaaatatagaaatatacacagaaaacataaaaatcactgatacccatagcctgacatcattctttatgatgaaagactgaaagcgtttttcctaagatcaggatggccattcagggtactcgagggtatgatagagactgtggaagaaacaaagcacactcacaccaaccactagaaatgaggatgcctgcttttgctggtttgctcaacataccactggaaatcctaatcagagcaattaggcaagaaaaataaataaaaggtattggaaaggaagtagtaaaattatatctgtcataggcaacatgatcttatatgtagaaaacaaactgttgttactaataaagaaatttagcccagttgctgcatacaggatcaacatacaaaaatcagttgcatttctataaaataacaatgaataagctgaaaatgaaaccaagaaaacaattttatttataacattatcaaaaagaataaaatacttaggaataaacttaaccaaggaggaaggcaagagatttgtccattcaaaactacaaaatgttgatgaaagaaattttttaaaaatgtaaatagatgaaaagacatcacatatttatgtaattggaatagttaatattgttaagatgtcaagattacacaaaatgatctacgtatttaatataatacccatcaaaattgtaatagtgttttttgaagaattagaaaaatccaccctaaaattcatatagaatcttaagggaccccaaatagccaaaacaatcttgaaaaagaatgaagttggaagtctcacacttactgattacaaaatatattacaaagctacagtgatcaaaacagtgtagtacttgtgtaaagacagacatagatcaatggaatagaataggtagcccatatattaaccctcacatatgtggtcaaattattttcaacaagagttccaagactattcaatggggaaaggacagtctcttcaacaaatgtttctgggtaaacttgatatctacatgcaaaaggatgaagttgagctcttaccttacaccatagacaaaaattaagtcaaaatgaatcaaagacctaaatataatatctaaaaatataaaattcttagaagaaaacataggagtaaagcttcctgctgttggattttgcagggatttctcagatatgacaccaaaaccataggcaacaaaagtagaaatatctaaattggactgcatccaaatgaaaaactttcaccaattaaaaaacactatcaacacaatgaaaaggcaacctacagagtgggagaaaatacttgcaaattatatatctgatcataagttaatatccaggatatataaggaagtcctacatctaaaagcaaatgagaaaacccaaataacccaaaaaactcaataaaggacttgaatagacattccttcaaaaaagatgtacaagtggccgacaagtgtatgaaaaaatgctccatgtcaccagtcactagggaaatgcagatcaaaactgcaatgagatatcacctcctacctagtaggatggctgtcataaaaaacaaacaaaacagaaaataacaactgttgataagtctgtggagaaattggaacctttgtgtactcttggagggaatgtaaaatggtgcagccacagtggaaaacagtatggtaattcctcaaaaaattaaaagtagaattgccatatgatccagcaattccacttctaggtatatgcctgaaggattgaaagcagacactcaaacagatatctgtacccacatgttcacagcagcattatttacagcagtcaaaatgtgggagcaacccaaatgtctaatgattgatgaatagataaacaaaatgtggcgtatacatacagcattatttaaccttaaaaaggaagacaattctggcacaagttacaatatggatgaaataagtcagttataaaaagacaaatactatatggtgtaacttatgtgtggcatcaggtacaggccgactcacagaaacaggaagttggatggtggttgccaggtactggggggagaaataaggggagctaccgtgtaatggtcatagagtttcaggtttgcaagatgaaaaagttctggggacaggttgcacaaaaatgtgcgtatacttaacactacagactgtacacttagaattggttaaaatggtaaattttatgtcatatgcattttatcacaattttaaaaagtcacttatgatccacatgatctcaacatcagaactgaccaatgttaacattttggtatataactctgtctagtttgtagatttttctttcctaggtgtatgtgtttgcaaatgtgtgtgtgcatacacacataccaacacaaaatttgctctgttcgtctgacagttctgtaggcatgtagagaactacaaattagacaagatagttcctgctcacatgagcagagagatactcaaataatgacaatgaaatctagctgtgctctagtaactaaacgctgaaaatgtcagaacactgcgggagccagagggggatgacctgcaaagaaggaggcatccaagttgagttttaaagtatgagtaggaattttatagcagaaagaggggatcatagcattccaggaaggagaatagcatgtgaaaaggcatggggttgtaaaaggttgtgtgtacttggggaataatgaagagttcatgcctgtgtttcgagaattggagtggggtaggtagtggcaggtcacgagcctagaggagatggtttggggccatttggggctttggtcttctagctgtgagccaacaggacccacaccctccaaaccctgagatggttggtttgattgattttaataacaagaatgatattttggctgcaacatgacacaacaatgattactaggaattacttgtcattgtagaatttgtatgataacccttgaaaagatgaccatttatggctctgcaaaaggaagttaccaatatcctcgttaccagatgtttaaatttctaatgggtatacaagttagctcgcaaaggttgatgtgctcttgctgttgcctttccaattggtgcactttgaaatagaccaagcaatgagtatacaaggtttattaatctttactgtttacaataacaataaagcaagacataataaacttttaaattttctaatagctacattaaataaagtaaaaatgaacaggtaaacttgacttgaataatttattttacccattttagtattgagatagtatcatcaacatgaagtcaatatacaaattagtaatgagctatttaaattctctttttatagtaattcttcaaaatctgatgtatattttacacttatagcacatatcaattcagactgttcacattttgaatgctcaatagccacgttgtcagtggctatcctattgaatacagcaggtctagaacatgcagtggtttaaacccaataaataatagccacacattgttcacagcctttggttggaatgaaacatgatcagtatcagcactgttttaagactttgctcatagtgcagatcaaattacttctctggcatttaggaaggtttaagctgatggagtataattttcactgacactttcatttgccaggatcatatagtgtctaaaaaatatgcagtcatgtcaaatcacggtaattagtgccagaaaaaaaaatgtgtcaaagcatgcatgcagactctaacatctccacttgccaacctcatgtgtgaatgttcttttgcattttcatctcagtcaacagaactgaattctgcttcaggatatgtacccacggcctgtgttagtataggtggaattgaatttagaacagaacttggcctgaagggtaaatgagaaagtgatctttaacactgctaaatattggaggtagcaaacacataagcatacactagacactttgataaatgtgtttgtatatgcgtttgcatttcaaccccactcaatagaattcattctttcagtctcaatgtaaacatatcatacccacttttcaaattttccctcattccatgtcttacatgtttttaagatacagatttgaaactcttaaatcatacattatctttttctcattagcaaaatttcttccacaatccatattttttctcctctcaagatacacgcaatttgttgtacatcataaccagttaggttcttgccaaaggtatgaaataatttttttgagatggcgttatcttgacgccaagccctccaatcaagataagaaactagttggaaaccccaacagttggaaagaaaacaagacttgagcccaggagttgagcagtgttttcaaactttgaaggaaaacaaaatcctaaaaacaacttattatggataacagacatttgttgtcttcaaaagcagaaatggtttttccatatctcttatttcattttgccttaaaaatgttagcttttttcaaaatgtggttataaaggaaaaggttgtgctttttttttcttttcttttttttttttttttttttgagtggtaattaaacagataaagaaaacaaggtaaagattctaaagtttgaggctgttaaaatagccagactctgcatctattaaataagttggaagcttccaagaaataacataatttggaactattgttatgatgttgaaagggctgttgtgtgagagtctgaaggaggaggagctctagggcaacaggaaatgagattcaagtaggaagtgagaggctcacagagaatgagaaagctgactattcgtctgccacttgagcaaggaagaggccctgtggagaaaatcaacaccattttcttaaaacatgctcaagaggaataataacctaccttattagattatggatgttttctacttcttttttctatcttggcttctttctcttaaattattactttttacttatctcaggaattaaagccttctctcttctattggtaatcatttccttttgacttatgattttacttgtgtgacttcccattgatatacctttattacttaacttaaaggctctgtaacttttttcttcttctttaaaaaagactgttgggattttgattgggattgtgttgaatctatagatcaaactggggagaattgatatcttagtaataatgagtcttccaacacatgaatatggtatattgctccatttacttcagtgttcaatttctctcagcaatgttttgtaattttcattttacagatctgacacatcttttgtcagatttatcccatttttgacgttaaaaagtgtgttgctttttaaatttttgatattttgttttcatttcaacttttaattattcattgttagcatttaaaaatgtgatagatttttgcattttgattttgtatcttgcaaccttgtgaaactcacatatatgttctaataccttttagtctacaacattaaattttccacatagagggttataacatctgcaaatgaagacagttttcttttgtctttccaatgtaaagaaagacattttatttatttttcttgtcttattgcactggctagaacttctgtaattttgaacagaagtgaggagagtagctatccttgttttgccccatatctgggaaatgcatttaatctttcactattagattaattattctgttttagtcttcagaataattctgtcttcataaaataagttacatgggagctagacaagttttgtgtgcaattggtattatttattttttagttggtagaacttaccagtgaagccatctgggcctagagttttagttctatttgcattaacgtttttagatataaattcgatttctttagtagatgagggctattcaaattatctatttctttggtagtttgttcagaaatgtgttcatttcatccatgttgtcaaatttattgacataaggttgttgaaatatctacttagtgtccattacatatatatagaatctgtgttgatgtcacctccctcattcctgatctgtctgaatagttatcatttttttatgaccatctcaagaatcagcttttggtttcattgattttcttaattgttttctttgtttgtttattttgtatttcgttgatcccactctgatctttattattttctatcttctacttcctttgagttttatttgctcttcttttcttagtttcttaggttggaagctgagatcactgatttgaaacctttcttctttttcaatatagataagttctatatatttccccttacttgatgacatctggcaatgtttgatatggtatgtttttattttcatccatttcaaaaatatttctaatttctcttagaattcttctttgacaaattgattatttagaaatatattatttgtttccaaatattttggagatttttcaattatccctttgtgactgatttctagtataattccactatggacagggaacaaactttgtatgacctgaatccttttaagttattataatcgaggctaattttatggcccagaatatggtttgttttgacagctgttctgtgtgcacctgaagagaacatgctttctgctgttgttggatggagtgttttgtaactgtcaatttggtcaagttggttggtagagctgttgaaatctactatctacttactagctttctgtctacttgttatattagggattgagaggaagtgttgaagtatctttttgttctctcttattttggatagtttctattggtatatcttcgatgtcactaatcttttattagacgaaacatctaatctgctgttaatcttgtccagcatatttttctcagatagtgtggttttcacttagagatgctcaattaaatttttttatatcttccatgtctctacgtaacttttggaacatagaacagatagttataacaacttttctaatgtcgtggctctaattctatcatctgtgtccattcttggttagctttgattgattgatttatctcctcattatgggtcctgtttttctactcctttgtacagttggtcatttttgattggatatacagacattgtggattttaccttattaggtgctggatatgtttgtattcttataaatattcctgagttttgttctgagattcagttaggttacttggacacagtttgattcttttggatcttacttttttgacttgttgggcagaatcacagcaatgctcactggggctaattattacccacttctgaggcaagaccttcccatgtactctacccactgccccaggaatctttccattttccagtcttgctgttgagaacaggcactattcctagccctgtgtgagtgccgggcgctgtgacctctaacctcttcgagtggttctttcccaggtaggctcttcatctgtatgtgctgatcagtgctcagctgaatgctcctgcgggaccctctgcaaccctctagaattctgtgtctgatcagctgtcttctccctagtgcccttccctgaggactctagctgtcttggtctccttagactctcaactgcatctccccagttcaagaatcctgccagtctgcttctgtgtttccctccccatgctgcagcatcttggaatctctctcaaagcagtaagcagagggatttctagggctcatgccattcatttctcatcttttggggatcactgcccttttgtgcctgatatctattgtcttgaaaactgttttatatattttgcttatttatttatttttggttgtttaatgtaggagggtaaatccattccattactccatcttgatcagaagcttgatctggggcaaatatttaaatcccagttcctctattttctcaattttcacccatgtttcataaggctgttatcgagtgtgtgagttgctcaacgtaaagtgcttagagcatgcctggcatttggtaagctcccctccatttcaggagggaaaatgactgaggtccaaaagagacaatggtcccaattgctcttcctgagattgtcaaaagaatcatgagacagttcctagaatgaatgctaggcaaacctctgaggtcagacagtggctgaagcacgagtccacagaagtgggatggtgctgccaatgatgacaccagcctctctcatctctcacgggtagtcttggagagtaagaacagctcatgcagcaaactgccatgagtgacagaggaaccgatgaaagatttctagatggaaacgattgttgcatctgatagtctactgtcagtcttggggataagaggcatccactcagatatgtattggaaagtagttcagagcctcaaataatcaacaaatgtttccagaactttggggatcatctactttggccccattattgggctgatgagaatactgaacaaggaaaggttaattgacttgttccaaaggatttcccaatagggactgattaggaacctgattggagagtggagcagctgctgtcaggaccctgcctggaggtcctcacccttaccacatcaagttctgacttcacttctttgtccaagggctttctttgactcacaaagcatgttttgcctgtcgagtagaagcatgaaagtgtagagaaataatgcccttgtccaagaatccctctcaaatgatgactgcgggaattggtgtgtaagtaccccagcttccttcctcaggagcacatgctttacactgcttcctggaattcactcgtgggattgagctccagttgtctacagtggtagctggtttgataacacacgttttattgatcaccttcacttcactgtctcatttctctacctcctactggtgtttcttgggctcacatccccaaaatcattgcttgcccttaaatccttgtcttgttgtctgcttctggggagaacccaaaataaggcaggggctacatggggacaatttacaagtttcaggaaaggaagaaacaacaaaggcagaaatccctttttaatgtaatgttatgaaagaggaaagaaagaattactgctctgaagctctaatctaaagattagacagaagcctgggaggaaatgatcacaaaataatcaaatccttgatgatctcaataggaataagccagaaaatgaagagagttcagtttacgaaagcagatttgcttagattttctctccagcctttttcccctaacgattacaggaatgtgagtgaaggatgaatggagatattagaactattatttagcagcctaaagtttgcttcagaaacaaacaaaccagggtctcagaaggacagaaatgatgagaaaccaaccaaggcctcactgcagactctgtgtagttagggcacattggaaatgaggccatgtcctcaacaagaagtagaattagacagcccagcaatattaagcgggccaacattgaaagaagttgttgccagcaaagggcataaaaataataacaacaaacagaacatttaaaatctattgggcagaaggaaaggatcagagaagttgtttttttgacagatgaaagctgtaaaaatctttctcacttctgacttttcagaaaagatcagcagtgaacatttggttgcagcaagttctagttatacattaggaaagaaggcaaactctagacagggggtgatgtagttcaagatgacccagaaatatgggatgcattgagcttagcagggcccacacagtgctatccaaaaggactttctgcatgggtgggcatggtctgccccagtggtgtccaggacagtggccactggccacacatggctcttgagcactggaaatgtgactactgtacccaaagaactgaatttttgaattttattaacttttaatcactgtaattataattaaccatgtgtagctgagggcttccatattagacatcccaggcctggaatatattcccccaggtaatgtgagatgtcgtgaaggagccactggcctcctattttgagacatcacatagaacagataataagcccaaaaactggggaagggccagtgtcacaattgtacttttctaagagaaatgtgaccactggaaactacaggtttgtccaacatctgaaggtacatgggattgtaccctcatagtaatgaactgttatgcatcatcttcatgcttgttaaacttgttattcattattccttcaagaaatcagagaatgcttattctattatagagaatgaagttttgcctgattctaggatcacaaataaaagtcaatgaattttcttttaaagaaatagttattgagtaatacatatgaggtcaactctgggagccatgtggtgaacaaacagaccccatctctgccttcatctcctggaaatgttcctctggcaaaaagaacagacctctgaccaataatcacattgatgtatttaattatagtataactataaaaggtactgtcaataaagaggacatagtactgtgggaacaaataacggggcctcagacatagcagaaggcagcagggatggctcttctggggaaatagcatttaagtaggagttagtcacgcagagatgtagcagcaggtaggtgggaaagggcattccaggtagagggaacagcatgcggactggccctggggaagggaggactttgacatatttcaggaatcataagaatgcagtgtagctagaatgcaatttgaaatatcatcaggtggtagagccttttggggcaacaaagcccagtggttttctcgaccatttatgattagcaggggaatcctttagtcaaacaaaataaaatgggtaaccctcatgataaaacaggtaaaagcagctgtgctcaggtctcctgtgtgcttctgcacggaagtgccttcgctaagctttgggacttgatgaaggtcacgtatcttgataagagcaaggggaaatcagcattgtggtcatctggccccactgccaaaggatatttctgctttactgcaaagcaataattctgaacctgctgtcagggatttcttggcacccctttaaaattcagttttactcagcaaatatttttgagtgcctactatgtgtgtcaggtactctcctgggagctgggaatatctcggttaacaaaacagaccatggcacctggtggagctaaatttttgtgagctcgtatttagacaatgaaatatgggctgggtaagccaatagcctttctagttgcagaaatccttaggttcttatgacagcactgtggacaaataaaaactcccttacccacttgtcatgggggtgtaggtaaaagtggaaaagcaaatgggcagtgagatccgcagtcagtactttgtaagtagggcttgcaaaggaattaccaggaaacaagaaatcccctggagcctaacgggtctagttttaccccagttttttgcctggccttccatcagcctttctccttctgtatttgttcagacgcacctagctgatgatttgggcatgagttttaatccagttcagtgcattcttcaatgtgatacagcatggttgctgatggggcccagaggtcgggctggacactcctgtggggaagtcatgtgtggtctgttcagagtgcaagcatgtccccttgcaactgcatgatgcatgcagctcctcacaagagcttggccatggctgaaggactgaaggggctcttccccaggaggctggctctttccctaattaagtggcagttctttcacctggtgcccaagcaagatggtcttgcattcctggtttctttcaagcctattagggttgaaatggctctatttttaaaaggccagtcagtttttttccactgtctctcggggtacttaggacagagagagcagacagtatgacacatcccaaagtcatccttccctagtgaccactagccagtgccccaggaggtcctacatccacagggtgggttcttgctaaacatgactttctctgaaagacagaaatcacatcttttcagctgcccccgccccaatccccagcttctctggaatcttaattccaaggtgcagtgcatttttccatagtccctagtccccaggtctccagagggcccgggcccactcctagcatcccctctgtgcagtggcttgagtgagaggttagttggcgtgactgaaaccaggacttgggattctcatgttggtgcttcttccagcagctctttgagaaaaccaggaaccactagcacatcactctcaagtctgtcttcccgttttttctggaaagtaaaagttactgttaggaaaaaagattagtgtttgagaaaacaaaatgttggtgcgccttctgtcagtggcattctagctgcctcaaatttcttttcattttgagtcagggaataaacgaccaaaatgtacttagtaccctggccacatgtatggaagccaaaggcagaatagcgacttgggttagatcacaagggagaagcgtaatttcagccacatctatcttcacaatcactgctcctctacattttcgttgaaaaccatcctgacttaaataacctgattcccaatagtgcatttggtttcagtgctgtttccaaccagtttaaaacaaaatcacaagccttgaagaatttgaagaatttaaattttatttctacaaaggataattattgaaaggtatagcttcctgggcttatggtcacacactggacagtataaagtgaaggtgtcttatttttggcaggtgtagaaggaactttgggtaaaataatgaaacagttttaacacacggatttggaaatgtattcatgtttattccgtgaatgattttctctgctgaaggactgtgttaataaatattctgccagcaaatatattttctaaaaggaacttctgaaaatatgattttgaattgcttcatggaacttgctggagtcttgggcctgcccctccttcttatttaattgctttagaaagttcttagaatgcagtctaagaggcttaactgccttcaagaatattgtagcagcccatcccgaagtgcttattacattagaacatttagtgcttttaaagatggtgtgtgtgtgtgtgtgtgtgtgtgtgcgtgcgtgtgtgtgtgtgtgagagagagagaaagcatatctaaatgttggtaccaaatcataccccattggaaagattcaattttctgaaattccacctaagaatttttgtatgtatatatgaaggcaattgtgaaattatagagaattagcaaagtttatttagaatttgaggggtttggagtgcagttttacagattttctgactctcttttctttaatgtccatgcagagactaacataattgacttttagatctttatccagagagtcaatccaattcaattcaaaaatgtttattgccagtccactctgaacaaacaggatgtgatttctaccttaaaggaatttacagtctagctggggctcaagacacatgttgacacatttattgcaatacagagtgatgaatgcagtgagaaaagtggggtgagctacaggagactggcagacagactgaaaggtagcacagagggggaaatcattacatttggggacctgggggtgcagtagacatcacagcgtgctctatgccctcggtggctggttcagcaccccaactagaatgagacagtgccatgaccttgccatcccaaagcacagtgaggttatttgtttgctttttctattgtaagttagagaaatattgcaccccatttatgaggtactaagtttccaagacacaagtgtaatccctggtgatgtgaagggaggggtccagtaagagaaggcagttgacatgtggtgctgccaggtgtctgtgactagcacagacacatatcactcaccaatcatggcactcttttctgttgatctctgacaacacggtgaaccaggtagtttctaccaatctgtgaggttgggatccagaggatatcaattgacaattaccagaggatctgtttctggaaactgagtaagaagatgggatcttgttggatgcattaatccagagacgatggaggcatccaaggactggagcgcctccttgtcacagagtccacaagcagagtggttgagcattctgggagtgtatttggcagcagcagcactaagaggatggcggtaggagacctttggatagttggaaatgcccttcagatggaaagcattcgccatctttagtttttctgtgtcccggtgctgtgtcctcattcctgtcttcctcctgtgagttgagaacggggcaggtcgtgctctgatgctgcagctcctgctgcttccagtgtgaaggggcacctggcagagcagagctgcctttcatgtcggacacagaggagggaaaataacaacaaagttttcctgctttagaagagaactgcaggaaagatgcagcagagagagctcttcgtggagaataaatgaatcacggaagtgtctattttaggaatctttactcttgattaatctcagacatagaaagaaaagaaaggaaaacaagtagccaagaacaacaatagtaatgatagttgtcatttaaactatgcccttcttttccatgttatataggttcccattctccaccatattgatgtctgaatcttttatattttagcaaggacatattggcaatggtcagtctctatcatggcgtctgcatgctaaccatgaaaccgccacagaagaatttggcagaaggtgtcactgaaataggagtaagtccttctacttctttctgcattcgtggtggttgggacacaccaaggatgaaggctgctacagttctaaggaaaccttgtggctttatgggagtaaacctgtaaaactggttccttctctgaacattctttctgtaacacttaaaaaaataccaacagtttgcaaaacgcttctaagaatagaaaagaagtcctcccttacctcaataaaatgtgggaataaaatgttgagtacaaatgcctttgaactcagaaactggagaatttgtaatattttacttttgtctgattgtgaaacacatgcctgttcattggagaaaagttgtaaaacactaaagtaccaagtaaaaaatactaattatatcattcagatataccattaacatttagtatatttgttgtcattaaaaattctataaacattttttttaaatctacataatgctttgccattcctaagagattaacccgtataataattttcccctttttctagtgagggtttatttttgacattaaaaatactttttttttttttttttgagacagagtctcgctctgccacccagcctggagtgcagtggcataatctcagcttactgcagcctccacctcccaggttcaagcgattctcctgcctcagcctcccaaatagctgggactactggtgcacaccactactcccggctaatttttgtatttttggtagagacagggtttcaccatgttggccaagctggtctcgaacttctggcctaaagtgatccacccacctcagcctcccaaagtgctgggattacaggtgtcagccaccacacccggcctaaaaatactgttctgatgaccatccttgtgccaaaattggtgtctccatttttgtctatgtcattaggagagattcctagaagcaaaatactggtcaaagggttatggacaatttaacactcctctggaaataaaggacatccatataatgtggcaaataatttataaagcatttcaccagggaaatgagatttgccttcatgttttcattcattcatttgttcattcgggaaacatttattgagctcctgctgtatgctttcactgttctgggcgcaagagacacagggatgcacatgagaaatagtttggctaaagggagaagacgatccagaaacacatcaaagcaccagatattatcagggagagttccgtgaagagctcagtgttcttgggtcatgttactgagttgattggtgaggagggagacttagagcttctttagattgtagatccaggaggcctctctgagaaggtgactcataggctgggactgaattacaaggagacaccctatgaagaccagggagaaggaggagcccttcccaggaagaggcgcagcaggagcagaggccctgcaggggacctctgtgcatgggcgaggggaggtggaaacagctgcagggatagtgggttcaggaagcaaaacatgagtgcagatgttgacactgaagggtctagaggcaggatgtttcccatcaggtgaagaccagggtgtgcagcttttggagagtatgcatgacctgagaaggaggagaatgttctgtgccggatcagacaagtgaactagaaaaggttctgagcacctttgtggatgagccactgagtcagaaagactgcagcacaattatgctcaaatgtctcattggagaaggagtaggggagatacatttcttatatgattgtaacaagcaaggaaaaataacccaagtgtcaagctaggaaaatgatgcaataaattatgatagacttgaagtataaaatattatgtgactatttacaatcatgcttgtgaagaattttaataacataggaaaatactaacactactatgttgaattttaaaagatctaaaattatacataaaaaactatacacagttatataactgtgctattatgtatagtttgaatatatataatatgtgtgtgtgtgtgtatatatatatatatatatgtattcaaaaaatgtcctggcatagagtggtccaaaatgttattagtggaagtctttgggtggtagaattgtggttatctttaatttttatgtttatccttttttgcatctttcaaatttttaatgatacatgcatcacatctaaaatctaaaaaataaagtatgtcgacagttttttgaatgccagaattcagacgaaattcatcgcacagttattcaattacagaacaagaaactgcagaaagaatagaggcattagctagaaaaacgttggaaggaaccatgtaacaaagcaagttcctcccaagaatcaggagactttatcaaactcctcattagaggcctagaaaaaatacctacaaagaagcaagaaatgtggcacccagagggagaaaaataaattatcatcttaacagaaaggcattagacagtgtccttgaggaagcgaacccagcgtgcggtcatggcctccaaaagatagaagagaaagaaaagaaaaaaggaagcagcctcattgtcatgcatctcaggacacatttagaggagaaacagaaggtgctgtgctctggcctgggttgctaggctctctcaggctatctcaccacaaggaaggtggtcagagaaagagaacactcagggacaataagtatgtatcagatcatgagatgacaaaatggcagaactggaggaaatacgcctcttcatccctggttgggttgaaaaataagcgtggttctctcggggaggtctctggattccaaaaagccgaaaccacatctaattttggttttggtcatagccccagcaccaagaacattgcctggcacataataggtgctcagtaaaccctgaaaataagtgaatgaaagaatccaatgaaccatgatttgaaggtatctcaagtggtgacactagcaacatcttcattcaccaattcattcgttttctctacaaacatgtattgaacattttcctgtgaaaggcaccatctttaaaataaaaactggttcacaacaatttgatgagctcagtgggctcacattcagttgtgacagggagctgtggtgggagttgtttctggaaacatcccagccttttgagttgaagtctagggagaagccacataatgctgttctgctttccttggtgcctaagaatggccacacatttacgatttggtttcttagtccctgctttccaggtgatgttcccctctgccattttgggcaccgatggcccatgggctggctgctgtggaggatgcctgcttgaacccagggtgatcacaatctgaatggtgtgatctgtgacaccctgagcacacttttgcatcagggctcccattaccccttccttaggtgctgaatctccccatgttcccaaataggtgttacccaccttgggcctgaattggtctttctttgaattcttgcttcaaaaagaaagtgttgggtttttctttagggggacaatgacgtggactttattttttctaacacaagtcttcagaactctgtggtatcctgttagttggcaggacagtaaagtcaatatttgggaaatgtcaagatatgtttggactttgccttggacatcgccgagcagattgatgtttcttcctcccaagtctaggacctggatcttttaagtgcatccagcagcaagaaggaagttgaatttcccaggcaactgaaaaccctggctgttggaacaatcttgctgtgatgcatgagtgagtcaaataagcttgagtgatttaagggaaacaaatatggagcaacagggtatcacttggaggagggtctcattggcttcccctcaaagctttggccacctttcagtcagtttgaataattgtaggttatgcttttgaagagcagaaacgcaaatgtttcacttgagcaacctctgacgcgttgatctccagtagtacattataactttgggcatgaggacactgaatttcccttgacactgtcaaaatagttgacaatttttttgtacatatttggtgaacttcctttgtgttcatctcaggactgtcggcatgtcagaaattcacaatgtgagctaaagaaaagctccatgatagtccccaaccccagcccttacttgttcttcactgtatttttaactgtgagtacacggggtcagggtcacggcctcttcttctgcaacaagctaggaaaacctcttgaaaatatgaaattacagtattattgagtataccactaggcaaattctgaactccagtaattctaggaattcagtgcatttggcctgcaaatttatctctcactatttttcttcaaatccatccagtgcatctttgttttaagcctaataaaattaagccttaataaaattattcaggcaggagtgacccagacaaagaaagatgggcttggttggggtggcaagacagaactgtaaattcatggaaaaaaccttttgataggataaagatgggaaagtcatgaagaagattgtgaccattcaggttcccctgtgagcgaaatgccaaattgaagaagaaaagaaaaagaaggaggtggagaaggaggaagaagagacagggaggaagaagaggaagagtaaataaggagaaggagggagaataagaagagaagaaacagaagagggagatgaggaagcaggaggagaaggaggaaaagaggaagacggagaaggaggagggacaggacgaggagaaaggagggcaggaagagaaagagaaggaggagcaagaggaggaggaggaggagggggggaggaggagcacctgaaggcagcagcatgccctgatgaaattcttttaagatctcccacagaatagtatagggtgcatattttggatgtcactttgacttgatatcttttaaagaaagagaaaatgggctgttttctcatggcctgaatcacttggacttcatttgtgcagtaacagctgaatagcttgcattcagcccctaaactcccagtaaccagccaattgatattactttggaggcctccttctctttgatgtatctctgttgaacacatcacaatgtttttgggataaatataaaagatagttcaaagtgggaagagtggcttaaatggggaggaatatcccaactggtggttgctatcataatgcgtcatcttggcatgaatgctctaattggagatttctgatgctcaactgggacacttctaggatctgttagctcctgaagtaattttcagcccttttgcctttgggctacctacttagtcgttgagaaagaccaaacccagaagtatagggccaggactagaagtcttccagaattggactggacctatagctagttacattttcataagtcagaccattttctgaaaacagaaagaaaatggagaaatgagaacttgcatcattacatggtttatgatgcttcatggagtatcttgagcaaaaccaagatgcaatgaatatttgttgtataaataaatcaatggtaccagacattggggtccctggtctctaggacagtggaaaagagcagaggaattggaggaaatgctgaagagttagaaaaattttctaacttctcttcaagcaaggattactgtttcaggtgggccctttgagctgccccgttctttaaaggagactgtctgggaagatgctccacgctgaatgttctagctgcactgattgcccccctggttgcttgtttggtttctatcaagaacacccagtaatcacctttcactttccccccaacctcacctttgcagcagactgatgattacattttgatttgcaacttcttgttctaaaacaggtaagcagaaggaaaaacatgtctctatgacattctaccatagttccccaggacaggaatattttagtcaagctctttgttagaatggcttaaagtaaatgcattgaaagaaatcatcatggaatcaatcaataggtttgacgtaataacattttaaaatttctctttataatgttatctcatgagcaaaatcaacagacaagcatcaagctgggaaatgtttgaaaccaatatgttggagaaaaaatattaatattcctaatatataaagaatgcatacaaatcaataagaaaaacattaagacccaaaatagatacccaggtaaaggacaaacaaatctctgaagagggaatgcaaatggcaaatcagcatatgatacaatgtccagccctccttggttttgaacaaaatgcaaattgaaatagcagaaggacatcatttgccctatcaaattaacaaagattctaaaatgatggtcgaagaaagggggcagtgaagtagaatgtcatgtgctactcaggagaggcacagattttctggaaaataactagcccattataaatcaagagccttaaaacaggtggatacgttttgacctaggaattcagcttctagaaatgtatcatgaggaggtcatcagaaatatgggaactcacttatatacaaagatattaataacagacatttgctttatttaaacattaattatcaaagagtcaaagtgcaccaaatcatgagaatggctcaatgaatatggcttatccattccacggaatatagagctgttaaacatggtatgtgtgtaaagagtttgtgtggcatgaaaaaacttttaagatataacattagtagaacaaaataggaaaatatcactacatatcattttatatattttcaaaaccgtaaagagactggaagaaaatactctaaattcttacatcagttatctcaggacaatgcaattacaaggaactattattttctttttaaacatttttttctccaggttttcagaaagggtatcttttcctcttaaaatagaagagagaatagcattctctcagagaggccctcagtcaagatcaatgacctcatggtttagtgttatcttagagcatgaactcaatctgtggacaaataacctgtaaattacataatgcatcatatcacgtttccctttctgccttggctgtcaaaaacctaaggccaattataatgttcaaccaaaataaataattatcttgactttgtattgagttttctcccacttctttttatatcacttcatgaattttatatttatttttacagccttatagtatgtatctttagttagaaaccacttcaaattctttttattttaaaagtagttggctctctcattataatacctataaatgtgtatatcgagctttagagtcagtaaaaagcattgaccatatttagttttgatgtgttgtccagcagcaggggtctttgggaagtgatataaggatcctggtggtgttgagagtggacacgcttgtggatacacaggtatgtgcacaccactgacacactcacacctgctcatcctgcatgttcattgtagaatataagcctcagggctgcaccttttcatgcctgcatgttattccagaactgtgtaggctcctgtgccttgattgtgcagtgcacggtgtgacctgaatgacagaagccacctcaccaaagtgaggcagaactttattacaaaccctcaagtccactctcccgcatgtctatagaaaagttgaggtggaaacaactgcttccagccataccattcatttttcctaaagaaaccctaagtaagtattctaagttccactgtttaaaaaaagtgagataaaacaacctttcaaaactaactctgggctcaccagaatgtataccttaaatgtgtacaagattttgtgtatcagttatacctcaataaagcttaaaaaaaaaaaaactgaatctaggtccctggtcagggatttcggctttctcttagggtgaggtattgttcaaaattagcatgcatttcagagaatttgttctgtcaagtgaattatctcatcctattatattccaattccaggaggggaaagctaagatatacagtaaacctaaagtcatgattttagacttcttaatgtcttaaattaaatgtcttaaattaaaaggaaaactcaccaagactctcttgtccttgaaagacctttttctctagattgtgcaaggtggtaggcatatcatggtagctaagcaaaggtcaggggttcagacaggcctggctttgaattatatctctcctgcttattagctctgtaagtttggcagtgatatttaactccactgagcctcagttttctcatttgtaaataaacccagtaatgatagttaatgtgttacatgtttactgtgtgccaagcactgggctgagtgcttcacacatatcgactcatcccatcccccaccacctcaccaaggtgggtgatccatggactaccatggcaaatggggaaaccaaggcacaaaacacaacacaaaaacaaaaacaacacaatcatttgctaaagttctgtgtgagcttgtaagtggcagagcccagattccgattcaggaaacgtggcccttgagcctgcattcgtaaccaccctgggaaggtggtatgggaagacaactccagccttgtagtagatttttattttatggctcgccagctaactaaaatcctttcaataaattgtccttctgctgagctcaggcagaggggcttctttctcttataatgaagacctttgattgataagggtccttctccctcacagacaaggacaccagtgaggagagtggctctgcccaaggacacctgcaagccggtgccttgtcctgctggttcccaatcagtgcacttccttgtttggagtaaattgatatagtacaagagagattcaaggaaaagatggaattttagcagttcactacagagagcctgtaacttaaataggagagttgagtaggaattttaggtttggaaccaagaaccttcactcattcccttgcttggtcatttcattaagactgagtgtttaccacttcctgggctctgtgctaagtacttgagatgtgaatgtaaggagtcttttaaggagcttcctgtctatgggggagacatgcagatacaataaaatgccaccagtcgtatagcaaaactcgcagaaggtactgtgggagcacagaaggggagcagttaacctaaaaccaaaaggagcaatcttggagaacttcttgaagcaggtggcacttcagtttaattttttaagaataaacaggaattagacaaatgaagggtgacaggaaagacaagatagactggagaggccacatacacaaaggccgatggcaggggaaatgttaggtgtttgaggaactgcaagtaatttggggtgtattagaccagtgaggaaaaaaatagacccgtgaacaacctttagcattaaaaaatttaattttatcctgaagacagtaaggaatggtcaacaggaagtaacatgatcagatttgcagtagtgtagaaaatagattggagacaactattggttaaacatagtgcattatatatgtgtttatctttgttctctccaaaaatccacggaaatgataataacataaaaaaagtcattaatctgcaagtacagacagaatggaacaatagcgggcagatgagaggtgtcaactcagttgtacaagatgtcaagtggatggaagcgtgatacctcatcagtgaactagagacagtgggatccctgcttctgcaggatgggaaagatgagacaccaactagaagcaagctgattcacattgagaaaccttgaaagcttcagaaatcagggtgccagatatccataaatgtacagacttgggaaaggctgaaaacagaagaataagttgtttattaggaacaattacgtaaacttctagatatgctctcttcccataccacacagtcaggaaaccagcctgcaccccaaacctagcagaactctgaaggcacattttctgagttgaactagaaacattctgactcaggcatcagccgaggtgaggatgctggatgaggcatcacattacaatagtgggagtaagtgaaactctacatactgaatggtgagacccctgcctagcacccagaaatgaaagccagacctgtactctctaggtaggaagttggaggagtggaggagtccttttgggagaaaccaatctgctcaaaacaaaaggcctacataatgttgacattggaggtcccctgagagattgctagatccctgcctgcccactctgcagtgaaaccctgaaggaaatagtctcatccttcacagaaacagagctttcagtcaacattttagctcctcactcaaatatgaaaaaacaacaagggatcattaggcacttgaaagggaatggcagaaaccaaagtggaaaagcaggacaaaaaggaattttaaacaaacagagacagcgtggagcacatatgaaacatcaagaaaaggataagtgatagcttcaggtctaggagaagttgttgcacccatggaacaagaacagcatgctgtataaaaagaacattcagagaacacaatagagctcttggaaataaaaatatgtaatagcaaaaacaaaaaatccaaaaaaatagtgccaacataaagttgaggaaatctcccggaaaatagaataaaactacaatggatggaataaagtagggggaaaaaaataagaaaattagaggactggtctgtgcaatctaaaacccagataaataaaagttatagaagcaaaacaaaacaaaaaacagtaaatggaagaggagatgaaattatcaaagaaaaatacaagaaaatatccagctcataaatatgagttgactactttgaaagggctcattgagtgcccatcaccatgaattgtaaaagaccctaataatataatatataatataataatataataaacatcactcctctttaaaagaatgagattcttagagaagtggataattctaagtctggggcaggaaatgcacaagatggaacattatatcaaaccaaatagcaaaacagtcatggaagtaagtctgtttgggtcatgtcagtgggactcaggagccaatttggagagattcccactggccagaggtgtaatgatttgagcatcacttagaataatgactgtaatgaatcagacatgtttcaaaccacgagtctattatgatgcctaaaaaaagaagtcattggccacctttggaagatgctaggaaatcaactcattattttgaaagctgataaataacaagaaagaatcaagcatttattttgtctttcatgtaaaactgtagttcaagtaaccaaacagttgatgagagaaggtttctctttatacaagtatttcaactcataaacaaagaaggaaggaaaacaaatgtgaacttcaccacactgcatctcctggtgacataaaggatctgggccaagatcactgattattgctaacaccaaaaggagtgacaagcagacatttgtgcttcctggtggaagtacacaccaccacctgtgaggccctattgccaaaccccctctcctgctggcacaaatcaggcagtaaaaagctagcttcttttttttttttttcctgggcatttaagccagaagagaatatgttttgcagaggctcagtttacactgaatgcaaggaccggggatctggtataaaggtttttgcaagtgatggatttaatacttaatgactgatacagagcctctaagcaaaatttcctgaatctctgcccagaagaaatgttggaggtttaacccagctgtccatctgtcatgtggaccgtctctgcagtccctcaggcagatcctgaggggagggatgtgaaggggctgggaaaagggtgtgcagcctcctgggtaggatctttgcagcagctgccctttcctgccttcccgtgggaggcagtgctggaagctgcacagcatctcctttcacttctgagggctttcagagatggaggccacacgggctcagggacattaattccaggtctcgccatgtcctcgacagccaagttttttttttttttttttattatactctaagttttagggtacatgtgcacattgtgcaggttagttacatatgtatacatgtgccatgctggtgcgctgcacccactaacgtgtcatctagcattaggtatatctcccaatgctatccctcccccctcccccgaccccaccacagtccccagagtgtgatattccccttcctgtgtccatgtgatctcattgttcaattcccacctatgagtgagaatatgcggtgtttggttttttgttcttgcgatagtttactgagaatgatggtttccaatttcatccatgtccctacaaaggacatgaactcatcattttttatggctgcatagtattccatggtgtatatgtgccacattttcttaatccagtctatcattgttggacatttgggttggttccaagtctttgctattgtgaatagtgccgcaataaacatacgtgtgcatgtgtctttatagcagcatgatttatagtcctttgggtatatacccagtaatgggatggctgggtcaaatggtatttctagttctagatccctgaggaatcgccacactgacttccacaatggttgaactagtttccagtcccaccaacagtgtaaaagtgttcctatttctccacatcctctccagcacctgttgtttcctgactttttaatgattgccattctaactggtgtgagatgatattccatgctcatgggtaggaagaatcaatatcgtgaaaatggccatactgccattttcataatttcataatttcataatttcataatttacagattcaatgccatccccatcaagctaccaatgactttcttcacagaattggaaaaaactactttaaagttcatatggaaccaaaaaagagcccgcatcgccaagtcaatcctaagccaaaagaacaaagctggaggcatcacactacctgacttcaaactatactacaaggctacagtaaccaaaacagcatggtactggtaccaaaacagagatatagatcaatggaacagaacagagccctcagaaataatgccgcatatctacaactatctgatctttgacaaacctgagaaaaacaagcaatggggaaaggattccctatttaataaatggtgctgggaaaactggctagccatatgtagaaagctgaaactggatcccttccttacaccttatacaaaaatcaattcaagatggattaaagatttaaacgttagacctaaaaccataaaaaccctagaagaaaacctaggcattaccattcaggacataggcgtgggcaaggacttcatgtccaaaacaccaaaagcaatggcaacaaaagccaaaattgacaaatgggatctaattaaactaaagagcttctgcacagcaaaagaaactaccatcagagtgaacaggcaacctacaacatgggagaaaattttcgcaacctactcatctgacaaagggctaatatccagaatctacaatgaacacaaacaaatttacaagaaaaaaacaaacaaccccatcaaaaagtgggcgaaggacatgaacagacacttctcaaaagaagacatttatgcagccaaaaaacacatgaagaaatgctcatcatcactggccatcagagaaatgacagccaagttttgagttttgagtttcttcaacagctgagcctgaacaagggcttcagtttaggaggaggagacaggaagcaaggtaagcaaatgagacaggagagctaatattgttgcaggacttcttccttagttcagctaaagatgtggatccttatcacacgcccatgaaaatttaggcttgcagacgatttgaagagtgagaaaaacgggatttactgggcaaaaaggaaaaaaaagtggggggacagagactcttagcaaagcaagagagtgtgctttttggccatgggcttcgcgcctcacagcttaaattccaggttcaacacaggaagaagaggggccaggcttctcccttctgcaaaatgcacgaacttccggagcctccaccccagtggcacaggctggttagagttttgccagggaactcttcgcacctggctgtctcaatacaagatgtgtcagggagcgagttaccactgtggacaccgggaacctccgggagattgtgaggaacacgcctcagcctcagagttgtcccatccgggacaaagaagtgggagtctctttcccccagtgcttgagggtcactcctggggtgctgactctctggcagttctggtcgatcctactgagtgtgttctctggccagagaacacatgcagactgggtagagctgtctgcaggtaatctctgagggaatctaagtctcccccacatggccagtaaatggcagagctcagagcagaaccagaccatcttggccacagtgctgtgcttgtagcctccgcactaaacaggtgttgggttttttaaataaagctcagatctggaacttggggagagagggcaggctgctactggctagacgtgcctttgtcaagcaggtagtgacacaggtattgtgtgttgggagagcaagcagttacgggagtagggctgcacctccatggttctggcctgatgtatcccagaaagaactgaggatgcttgtgatcagtggggctgtcaggaacctggcttctgacctgggctatcctgctctcaacatcttctgtagttttgttgaaaatgctgacggtcattctcaaccctggctgcacattaaggtcacctggagaactttaaaaaatactgatgcctctgttccttccgcagagtgaggtaagtaattggtctgcagtgagtcctggcagggggagctttaaaaatctccccaggtgtttccaatgagcagccacagcttataagaaagttctaaaagcttaagcaggaagcttctattgcaagaaagtattattttagcaatcaggaaggaatttctcacctctttacaaaaccccacccagtgagttgggggaagaacgagcccccatagaaggatgtgtgagtgagcccttttgcctgcaggcctctgatggaataagagagttacacataagtgtaattgattagtaattgataaagttaggaagtcgcttatcagtgtcacctcctggccataaaactctgctgatcagtgatgctactttaattcccaagcttcagttttcacatttataaatgaacatattcatgtggcctgagcaaactcctatggctgggcacctggcatgctcagggcagacacactggcagctcttgccccgcatccagccggtctggccaagagtggttcagtgttctgggccacaactaaggtgctttagcagaacagggaatgttcgattttctcagccctactggtcatccagatgttgtgggagggagacatttgaggggctgagctcagaaggggccatctcccttcctctagcttttcctgctttcccgctcagccccaactgcagaaactgaatcctagcagcagggtgagtgcaaagtgataaggggcctttgctcggtctgaaaaagatggctgtggtaattaggacaaaagaaaatgtagctaggccatttaaaaactttgcaggatgctttccttcccaaagaatgagctaagcaggagcccccgggaggtgtttttaatggggctaagcagcaggagggtttgcagaattgttttctctgctcccaggggttctgtttctgttttggtataggcaccgaacttattggttttccagagctccatttgttgttattaataacacagcatcatccagagcttgagcaaaggcaggcagcaaggaagcaggaatcctgatatttagagagggctgcatgtttagagacatccctgcccagcccccacagtaggttggttctctggacattgagggtgccaggtcctgacagtgcactcaggatttgaagccaggtcttcctggggagcttactgtttagtgcaggatgccaggtttgtcggtagtcagcagttcatgtcccacaacagagtgcatgatacgatggaggtaggcacccaagcctggaggggtaggggaggggtgtgcaggaaaggagtttgtctcacaaagagtcttgtctgagatacgtttaaaggaagtgaagttatgaagcatgaaaaggaaggaatcccttaatggtgggaggaaccacatgagccatagcagagcgaagaggaaaggcatggtgtgatctagaaacagtagacaagtgggggtggctggtgcaagggaggccaggggtgacaagatataaagctgagagattaagcagaaaccaaatacccaagacaatttcctgggtccgggagcatagacttgactccaactccttccagcttttcattttgaaacgtacaaatctacagaaaagtttcaagaatagtaccataaataactgcacattctacacatggattcccaacttgttaacaggtgccacattggtcttctcttcctctctgtatatttttgccaaaactttgaaaataggttatagacatgatgactaaataattgagcatggggccgggtgcagtggctcatgccagtaatcccagcattttgggaggctgaggcgggtgaatcatttaaggtcaggagttcaagaccagcctggccaacatggtgaaaccccagctctactaaaaatacaaaaattagccgagtggtagtggtgtgtgcctgtaatcccagctacttgggaggctgaggcagaatcgcttgagcctgggaggcagaggttgtggagccaagagcctaggttgtggagccaaaaggcttgagcctgggagccaagattgtgccacagcactccagcctgggcaacagagtgagaccctttctcaaaaaaaaaacaacaacaaaaaaaaaaaaaaaaaaaaaaaaaacttgagcataggtctctaggagaaaaagacattatcttacataaccacaatgtcactgctattctatggaattgaacactgaaaatatattgaacgtattatttgacactcattctatagttaaattttctgaattatcccacaaaggaactttataggtctcctgttctttatggagagtctgatcaaggaagacataagaacactaatggccaatacccgcaaaacatacccgctaataaaaatttttgggctgggcacagtgacttacacctgtaatcccagcactttgggaggccgaggtgggcagatcacgagttcaggagttcaaaaccagcctgaccaacatggtaaaaccccgtctctactaaaaatacaaaaattagctgggcatggtggtgtgcacctgtaatcccagctactcaggaggctgaggcaggagaatcacttgaacctgggaggcggaggttgcagtgagccaagattgtgccactgcactccagcctaggtgacagagtgagactccgtctcaaaaaaaaaaaaattaattactggggacattggctcttttatctcttttaatgaccagcccccggcctttttgttgttactgttgctttgtttttcttgacattatcatccgttaagagtacaggccagtcactttgtagaatgtccctcagtgtgaggtttgtgcaattgttcactcattattagattaaggtcaaacatttttggcaaaagtaccacatgggagaggtggtggccttcccgttgcatcggttccagaggttcatggtgccagcttgtcccagtattgctgtcctaagttgtccgcttgatgtctctacagtttttccattttaaagatatatcttactcttcataattaagggagattttacagttctatcttccattctccatttgtagcttgacatgcttctctgaagagaaactcccaccacacacttctttaaattatcactgtagactcctgggattcatttttttattcaatgcattataattcattagtgtcattccttatgcatgttggtgctcaaattgtcccaaattgggccagtggttgctccttcaagccagctcgtgtgccttggatggtccttactcagttttgcgcacttccaggcttcctgcctaactttgtgctttcttgccctgaacttggaattacacttttccagagagccctagttccttttagtgaggaataatcactagaaacccaggtccatgtgctaactgtgctttattgctaccgaaatatcgctgcttctaggcccttcaagtggaaagtgcttagaaatgtgtattttcccaaacttactagtttatgccaataacaccaattcaacatgagattcttcctcacttcctcccattccatatccctacattggttctcaaatatatgaatatatttacttatttgtgctctgtattacaatatacacaaggttgtttccagattactgtataggtaacaccaccaccaacagcaaacttaccaggtaaaatgtaagatttcttggagctattttctttcttagaacatgtcccactatgggcgtacactcagaggactgtgtttaaaattacttaaatatattatttgtggttagattcaattgtttatatacaactttaggcttgtttatctttgaatttattttttggaaatgcaaaatgcttacatttcaaaaagtcaacactatataaaattgtttatctagccagtgtcctagggataggcacttggattgtttccaatactttgctatcacaaataatgctgtggtcagttattttgatgcatggatgtattttcgaggtaaactcctgaaaatgagattgctgcattgaagggcacatgtgtgtcattttgtgagatgttgccacattccactcactaccggctgtaccatttgagtttgtattggttctcttggggaatggatttgagaggaaatgaggttggacctaggagcatgggtcaggaggctactgcggccatccaggtgggtgatgaggaatacctgaaccacaacagtgggactggggagtgagaggaggggccaggctagaggcttggcccttgattggacatgagcagcaagggcataaaaagaacagagaacaaaggaataaaaagattcccaggtgaatgcgtgaaggggaagcaggcagtttggtgtccacactaggacaggaaatacaagggtgaagaagatatgcatgtatgtgtgtatgcctgtgtgtgcgtgtgtgtgtgcatgtgtgtgtgtgcgtgtgtctctgtgtgcatgtgtatgcatatgtgtgcacacgtgtaggtgtgtgtgcatgcacgcgcaggaatgaatgccatctgaacacgtggagtttgggaagcagatgcccaggaagcctggaacaccaggtgaggtggggctggcagcagtgagacaccggcatgaaaaaagcagcaaaagccatgatcgtggatgagatcagtacacacatcatagtgtccccagactcggacacacagggaaaatggtgcatctgctttacttttgtcgggtgaacaagtgaactcattgctttaaatttcaaggtatttcatctgaagaggcatctggaggctgaaaaaaatatattgagcatattatgtaaaaatgtaaatactgtttagaaagaaatcgattttatgtttcttgacttttcaaataccatttgcgctttagtgttccactgggggctgggggaaaaggtaggtggatgcagccttggccccaaaaatgaggtgtgaagacgctccctgtgaaacaagctgctatcgggaacccggagtccattcccactgccgtgcctctgcctattacaggccccgccctccgacttgtcctcctcccaggcctgtcctgggctgacccagagaggataaagatctctcctggaaaaaagtatttgctggaggctgggaggagggactccaggcagtgggaaccagtgggacctgtagaggttgtctggaaaggggcttttatctcccgtcagggaacaggctcttcatttccagaggatagtttatgtttcgctctgtgtattcatgcacaactttaatatcagtggattaatccacagttttagaagcttatcaataattctgctgtccacacacatataacaaaacagcacatttgcagtaacacatcagggatcttgcgttgctgtgctcctcatatttgaattactcagataattggaagtccaacgtttggtttggacttatttcagtgcagtcttttgaaaatatgttcttgccaccttgcactgtgtctcgtgcacattcctcagccgtctctccatgcagtagcagcagcatgagcccggtctggttgtgggtattgcagttgctgtttgttcccttcacgggtggccgtcagcttctacttctgttaccttctggtttgcctcaaccagctcatttcacaccagtacaattcaatcagtgtgcttattgtttgctagcttaaacattcactgagcttggacacagcactcaatcgacaccgtgttaatactgtgtgttaagtaggagtcattagactctgagggacttctcaaaaataaatgtctgactggagttcagggcactgtcagcaagggctgcgaaattctaaaatgggaacaaggatgtggaggaagttccacatttgcatgttggtgtctaaccactggtacttgcaacagacattattttccccaaaatgataaaactgccagagccactgagcaaagtaagctacagtgtaattgctcatgtgagttctctcctttgagtgggcaggatatggcatggaccatccttaatcctcatcggggaggcagaagagaagcagccctagattgtagttccgagttcttacccactccagattccatcacttcttggccacgtggtgttgggtacgttgcagcttccttatctacaccttccttttctctaaaattgtagctatttaacctgccctgcccaggaggtgggtgtgaagaggctttatgcaagtaatgcagtctacaaacataaactgtctttatcagtatcgatatccttacttgcaagttggggatatggcaaatgtgtaatagacaagttgtgaattgtggttttgtcagctacagcaagcatgggatgccttctttccatctttaggttcttccctccccctccagtgtttctgcccaggaatttaaaacagaaatataatgctattttttagaaatcagaaataatttcccctctgtacactattagcagccagaaactttcatttctctgaaggttactaaatgcaaaagaggtatgaactgtgtttaacaaaacaaaagcaagcaactcaactatcctcactgttcactcaaccatcctccactattctcacctttacctctgttatcattgagaaaagaattgatgtattgggttgacccagaggaggctgctgatatttgatcacttctggcatgtcatttttgtatgctcaacctaattatttctgagaaaagagaattacacctttggttcaggattatccaggcagcattgcagcataatgctgaaactctcatttttatggtgcaaagccttgaaagaagcctatggaaagcgtgtgagtaaatgcagaggtaatacacgcactatctctaatactttgtatctacccctcattcaggagacactgttctttcttgagttaagcttagcccgggaaggacacatatttatgtggaagacgatgagagttagacttgaatttactgtgtcattttaatagactgcttcatctacttgacaatgaggttcttccaggattatcttcgaagccctgatgatctgctaaataaataatgttctgggccggccgactctatatatggtcatccgagagggccataaatctgtgctcctagggtagcaggagttcagttgtcccatttttatttctaactgacccataaaaggcatcttcagtgttgctgattatgctctcctcatttgatttggagttatgtcaccctaaagcagggagaatttcctcacaataaatctctcatttttaatctcgagctacagtgggaaagcctgtctgcacagctgagaaaaaaagaggagggcctgggctgtgatttaatagggtgaagggtggggaggtagccaccctaggggctgcacaaaggcatctctggggaagccgctgggaactgagtcccaagggggagagggaaggaaggaggaagggatttggtttgatctttcttccccagcccccgaccccaccctaatactatgtctttctttgagctaagatttggctcttgctggggtaaaggccacctttagggtttgactccttggagccatcatctctgctggcactgatcttacagacatggccaaagacatcattgttcttctgttttctgggctcactgaagacagacaaggcttaaagcagagaagatcaataatcaaaacagagttttcccttggctcaccgctcaggcaggtgcaatctccagcccgaccaagggtcttgatgccaaaagaaagaaaataaaggaaggagggaagttgggtgaggaagagaaaaaatagggagggaggaaaaggagggaaaggaccagggagggaaggagagcaagggggaaggaaaggccattctcccagtttatttatgtggaatttaaaaacagaacgtggactataggatttctgtagtcttcagggagagtgctaatggggaaaatagtgcatagaaatgcagctgatccacactagcagcccttctcccttgagatgctcctgctgcagcctgtgaccacatactcacacacacatacacatttgtatatgtgcacactcagtcaaattcacacatgcatacaggcccatgcacaagcacagctaggtagactcacacacttgcatgcatgcacacacacacacacaggcacttgcactcatggacacacatgcacgtgcacacacatgcaggtacacactcacctagggacacatgcacacacatacgcagacacggtcacaccctactccatcctgcctgttttgaattttggcctttgaagttgttgatgactttgatcagcggtggagtctgcacaaggtcatgtcctccatcctctgcctgccctcaggaccccagcacagacaggtatctctgctgggggcaaaaggagcacctaggctttggggtcagggcagtagagcagcttttatgcaccctgggaagatgctaactggctggttggccaatgggaagggagtgttgatgagcactacagtgaggactctggttctgccctcaacccagccccatgtgacatcccaaggtcatccctaggggaagcctgggtcctccgagaaacagatgccaagacagaatgaaggatgcaagggttttataagagaaatgcctataaagagggcaagggagctgggggagggttgggaggggcagtggacccctgcaccttctgacccaagtgaaggagggagagagggaagcaaggttgtgtgaaagcatccacgtgtggatggctgtgcagtacagacaaggttcagcaagaccagcagagcatcactgagtccttggtgttcctgctgtgctcagtcacaggctgggagcagccgctccatggggccgtgggtctcagtcaccctttggtcagtggtgaggtgcctgtcgccagccagataagcacccagagcctcccctcccagctgccttccaaactactactgagcaattggaggaggtagattgaaaactcagcctggagtcagaagcagtagccccagtcaacttcatactgagttgaaacagaaaatcaacaattcactcaagaaatagattcacttcaaaaaaaaaaaggtaaattcattcaaataataacttgttaacaaggtgttttctctgtctgaatttgaggagttctctctccatatccaactgggcaacacagaggcatggctgttatcagcaccgagaaatgtcagggttttaagctgccacagagaacatttagcttgaaaataagaaagactttctggatggtgaggggagctttaaacattgcaaagggttatagaattattttgttttagaattcttaaaaatcaggtttaaatcttaccgttttaaggtaagttgagtgactcagggggaagatgctttgaagtcctagctttgcaaactacctgaattctctcagcatctggttgaggtcatcaaaggcaccactgaggtgacagcagggagaggtctttgctttgaggctgacaaaatatgcagcatgtcaatgcaaacatagtgcttagcaaaagccaacccccaatgcgggtatcctagaggagcagatagttggctactatcatttttacagaatcaaacagatttatatatatctgttttatatatatatatatatataagattatatatatataatcttaataatcatcctaataaacaattttcagagtcaaaatttaaaaagttgaatcaatcaaagaagacaagaaaaaatgcctgattaatttgaaagtattagattgctttttctgtgaccatctttcagttcacctattgaactttctctcattgttcacaataattcacctaaaggcagatgaccccatggagaattccaagctgacgtctaccactctctgcctatctaaagccccaagacattcataagtggaaaaaacaaaaaaagcaacaaaagtcagcagctaaagaaagtcttcagtcagaagcttggggtctctcttgtcacctgggtgagagtcaggtaatattgcactgcggagactggctcagctgtgttgcctcagctaataaggggaatgctttgcttgctctttatagccagatgtattattaagcacaggtttacagaagcatcttaaaacactgacttagtgctgtaaactgtgaaaagtagaaattcatgtgaatgcttcaagtttttttgatgaactttcagtggatgatggtggttgtaactgtctgctttttatttttgcctagtgttccattattggaacataagcatgtgacagttatttatatcctattgctcaaggtcatcgccaaggtctgattgcaaaagttcaaaaaattgcaacctcgggcataaatgggttcaataacattagaaggactatatttcattattcaggtagttccagttaagatatagatattttatcttgtgcaaatagctctctctctaggaagttctcctcactcaggatttaatggaacatgccctttctccgcaatgtatcatccaaggcatttcaggttatatgtggggcagtatcaccctgttacttattaatagactaatgatagatgaccaaatcctcgtacataaaacatttatattttatttctggagtttggggattgaaactgggtcaaatcacagagagctcttacacaaactaatgagcttacaaaatccagatcctcagaaatcatgcagtggttttaatgaatgttccgcagggaaaacgcaccaagatttgttgtttgaatgaggcagtgactaaactcaggtcaccttaggtaagttttctccaagatgcagagtattaaacttgcatctgcatctctttgattgttttgcttcctttttaaatcacagtggttggtttttctctttgaaaagcaagataaggatgaggacaccaaaattcttctgctgccttgtggtaggccctggaatttggtaagagtgactcagtagagactctcactttgaaaaaatataaagtattaatagaaaatgtaaagtatggtaagaccaacaaattaggagacaactgccactgaaaaaatagtgcgtagcaatagcaagcaatttcaaaaggtgagtccatagcgccaaggggaagtaggactgattaccgtctcatcttaatgtctctctaggccccatggtttaaaaggactcacattcttcacataaaggttcttttcttttctcactaggtttttgacacctggccctggggtgacctgaacagtggatagtggtcccaaagtggggagtgagagtctaataaaggagatggttgggtgtgagctctggattgattggtttgtatttgaaaagcacagtcttgggtatgttgctccctatctctaggagctggttaaccctgggaggggcagtccctcagggtcagcaagatgcagtatcagagcattgaaatacaggaaatgaaagacgtgattaatacacatcactgagctgaaatgtcagtggtttaccgaacaagataagtaaagatttaggactacatttgtgctcacagaaacccccatatatgggaaattttcatgggcagtaaaaccaaggaaccgctgaactgtattctcccatggaatttcctaaacctggcatccatcagccccttttgatcactccgcagcgagggcttgggaaagctctctagagagaagcaggcagctgaacaaggtgcgagagaaaaggagcatcaccttgagtctgagcacatggtgggaacaaatgagaaaacgttcttcaggtgacctcagctcaagaaagtggacactgcaggaagaacatttcaattctggaaaaaacagaaaactttatagaaccctggtctgcactgttagcattggtgcattggtgacaaatgatttttttttcttttggagaatttgtcatttttgctcagaaagaaacaaataatacctacagtgaggcatgctatctaccattctctttttttctctacatccctctaataggcagcacagctgcctctggatggttatttgttcttggctaattacaaagtaaagggattttacagtcttacagatgggaacttagagataggatgctttttttttttttctggaaagaaatggagctcatttaatgcctaattagggagagtcacatgtgcagggtaaggggaatggtgactgctaacctgaagggaaggaactctttccttcttgctggcatcatacagggattctgtctcttacttttgtaagccacttaacaattgacagttatcttggcaacagccaagatattcaaaatttcaaaaaattcaaaaaattcaaaaaaggctatctttccttagtcttccccgtagcttgaggtgctctgcatatctttggacagatacttgttgatcaactgatccaattactccagctttggattttgccaaaattatttacaaatgctgccctctctattttgagacaatgcacaatggagagagaacaggcttccaagtaaggcaaggccaggtttaaatcctggcagagccaattaccagctgcagaaagttgggaaacttaactccccagaacttgaattttctcctctgtaaaatgagcataacagcacctactccatcacttcactgacatgattaagtggtactgcccatgcaagaacctgccatcttacagacttatcttcagtatatgttttacatttctacaccaaacaacatagaaaaggattttagtaaaaaagacattcgttgtcaccacttatagtctataccatagcattaagtacaatttcaaggagaaatgttttggaaggagattcatctgcccactaaaatgttaggaatccagaatgatctacttggctagatgatgtgctcacagttcagtactggacagttaggggtatcccagggcaattagtatgtgcttaaagtactcacggtcacctttggagctttttccccaggcaaagagtgacccagctggagtgcccacccctgacaagcactgacctgtagactcagaatccaaaggtgactgtagttttctcgtctgtctagtgagagtctgtgatagctttccttatctttaaagtctcttccagttggaacagtcctataacagctcatggttataggagaaacatagaacagagaaaagtctgccctgctgacttgcctacacctcacattgtagtagatgcccaaactggttccaagaatgaatgatataatgatgcagacattcattttcttgtctcttgggtctgcagcttaatcacctgaaattctctgtaccaagtgacctgctggcatgtccttcctacaagtgctgacttgtgcttggcaaggagactggtttaagatcttcctcagttcaaatgcaaatagtggagataataatagctaacagttgttgagtatttaccatgtgtcagatagtttccagaacttggcacatgtcagttgattcagtccttacaccctgaggtaaggatcactgttttcatatcctatactaatataatagtacttatgttttcctagttgcactgagccactaatggaacttctaattgacccgtcctttttcaacggttgggaatactctcctctgacttcctttaaaaaagccatgtaaaaggacccaagtagaatttcagctcatgatcttggccttatttagcatgacgctcagatttatgtctcttggacttcacagatggatgtgagaaagaactcctgctctacctgctgaaaaggttcagtatgctcatgtagatttactgaccccagtactttcaggggcttctccaggggatatcttccccacctcaaccctagtttctggctggatgctcccaggagctttgtggctgatagacagcactagagcaaaggagcccaggaggtcttctggctgcctctctcatcatatcagtcttactctcttttactcttttcttggtgtgtattcatgtatctgctttcacaggcagccgggtccagggtcaccactacacctggacccaatctttacatctcagcttctagggataatgggactctctccccatctctacttgggaaaaccccaaagaagggctctgattggttacagctggcacctgtgcccttccctggaccaatcacaatggctaagaaactgagggaccatttttggttcagcacaggccatgtctccacttttgatcaatttctgcagccaggggattggggtcacatcagaggatagcagcccccattgatgagaaagctagaagggcagtgggggctaggtgtacccacgaaaagagagatcaagttccaaaagacagaacggataaatgagtgaacagaataacatggtgagacatgtaaatgttggtgagtaaatgttggaggagcagtgaaatggccttgtggggacatcaaaagcaaatggactgtgtcaatgtaggggggagagaggatacataagaggaaagacatgagagtcggtgatatggtttggctctgtatccccacccaagtctcactttgaattgtaattcccataatccccaagtgtcaagggcaggaccaggtggaggtaattgaatcatgggggcagttttccccatgctgttctcatgataatgagtgagtctcacaagatctgatggttttataagcacctggcatttgccctgctgtcactcattctctctcccgattccctgtgaagtggtgtcttccaccatgattgtagttttctcaggcctccccagccatgcggaactgtgagtcaatgaaacctcttttataaattacccagtcctgcgtatttccttatagcaatgtgaaaatggactaatacagtcagaattagtagaagtgagaagacagagcaagaagtgctggggccaacatcatgccctcaagaatcccatgaggaggtgggaagaaggctgaggcttatccaggccaattgacccaaacggccaggacaggataatgctagtgagcatctgggtttccacagcctggccctgccctgcagttctctatagcaaacccacgtgcctgaggggagatggttttcaagacagctgctaggggtgccagggagctcctgtgctcctcaagtgcgttctgatcctgtctccatcctcctccaccctgttccccctgctctttggggcatggtggttggtcatgcttccctctcccagcataattccagaaaattccccaccaccattttgccacaagctggtgaagggacattaatgaggtcgttatagggcctgctgcattttcggaacagaactctgcacatgagtctaactgccaagtgagctgatggagaacaccatggctttccctgaaaggctctggcattagtgcccaaacactctcacttcctcaaggtcccctgtgtttttgaacccagggcccctgtgtttttgaaaatgtgaaatgataagtgagaaaatgaagtgaatcaagttttgtgggtccttggtgtctgggcatcaggcgctcagctgtgaaaggaaaatgctggtctttgagcacacaaaagtcatctgacagagttagaaagaaggggcttttcaccacttcagggcagtaaattgaactttgaaaagggcacctttccttctgggaggactgatttgtacagccgttatttctgagtgatataaagatggtcttagagatcttcaatgtccggctcctggcccatcacctgcttagggggtggtaggtagtgtagacagcaaactgcttgctggcctctatacaggacatccctacatggtaggtagtgtggacagcaagctgctcattggcctctgcacccgacacccccatacagtaggtagtgtagacaccaagcaactcattggtctctgcacctagcacccctacatggtaggcagtgtgaacaacaagctgctcattggcctccccacctggcattcccacatggtaggtagtgtagacaccaagccactcattggcctctgcacccagcatccccacagggtaggtagtgtggacagcaatctgctcattggcctctgcacctggcaccctgacatggcaggtagtatagacactaagccactcattggtctctgcccctggcaccctcacagggtaggtagtgtagatagtaagctgctcgttggcctctgcacctggcatccccacagggtaggcaatatagacagcaagctgcttttgacctctgcatcctccctctccagtcctcaacttgtgactgcctgaggcactgtaaatcatgcccagagtcaagcgcatggtgagacaagtgcatacccgggggaagaagcctttggctgtggctttctgggatgcagagtggcctcccaggaaataaggctgattgcctccaggttggcaccccacatcccatacagatgttcccattccactgctgtgcttgtctccactgccacatcttccttgcccctccaccagcctgctgcccccttagcactctgtgacagctgtcctgttggtgaccccagacccacattcagtggagcatgggatgctgctgggcagccatcccaggtctggggatcaggcctccctcatcttgagaaacgttcctttactttcaaaactttgtaggaacatggcaccaaattttcgtctttgtatttttgcttggtttaaaaaatttttttcttctgtggaaaatgaacacacatgtaaacaaaaattatatattgggacataagcctgcccttcctcgccaaaaaacaaaacaaaaccacagatagatttggctgttcctgtctcagaagtatatttgtgaaacacttgtgaatgatttatatcccatgtaactccatacaaattttgttagcacatgtgagtaacttcttagcaccccaccaaaatgattactaataatagcctgattcaccaaaaacaaaccaaaacttatttccttccaagcaagagtcttccagatctcttgctttcttcctttacatttatccatcaattatgtctgtataaagtcagaacaactgatggtttggatctgtgtagtgggcaagttcagaggtctctgaatggaaaataatggaatgcctcgctgatccgagtgattgatttggcaataacacggtctctccgtgtagacgttgttaactcttgctgagggtaagaaggggagagagaggttgaattcggtcttaaactgaggaagctgttggctttgcatgtggccagctttgggtgggagggggatgttagtggctgggtttctgacgggatgttggggttttagttcaatacaagaaatacatattcctatggatttattatatttcactttttcaaatatgggaaacaaaatcaaagttaaccttaacaatttgtctttgctgaaacacagtgatgtgagaatcctcaagcactgaaaacagacatcgttctagaatttgcattttcttatctgggtgaatttaacttatttcgaagctcagagatatccaatgtaaatttaagagcagcaccacagcctgtacttcactttgatcatgctagtcctatctgaccgtgcatccactcaccttatctgtcaaacacctagttgtcaagttaggcgctctgtggtgttcaggtaggaaggttctatctgtaatctcagaaggagctggcaagacagctggggagagagaatgggacaagtgtccagagatctcttttgtctctgactgtagtaagtgccttaaaagttgaatgctgcagagatatgcagaaaagtaataccccagcccctacggtgtttcctagcaagggacaaactacctttgacctatatacctggcttccaaaccatgaggtaagagagagagggtgccgacaacgaacatttccttacttttctaaaccagaagagatttcattacttggaaaaatctagaaacagttcctggaggagaggcctcactgttttttttttttttttttttttaagaatgaatttatttagtagaatgaatgaatttagtagaatttcagctactagaggtaagtccagctccaaggaagtgtgtcagcagaggaagaagaacgatgagagtgtccagggttctgccaggcatctggagggatggatggaagatgaacttaagggctcgggtggagggccctgggtgagggctcagcactgggccgacagcagcctcagggtgcatttggataccgacggactgttttttcatcacatatgagtgacaggggagtttagatggatgggttaaaagcaaagccatgtattctctgagtgggaagcaggccggatcctgagagttcgtaatcattgagatttcacatcgcatacctgcagccatgtttcagacaagattgtgcacccactcctgggtgaggcagcttttgaaaccaagctggaagcctttagccttcctgctgtctcaccaagctaaggatgggctgacctctgtatgggaccttcccttccttgcaccgtggaagcccatttctaattcacattctgacactgacaaactcggtgaccttggttacgttatctcatcttcttggaccccggcatcccacctaggggccggaagtaatgacggttgacacctcatagccacacacagggctagcacagactgctccagacttgctaggtgagggccctgtgcatctgaaagcaaaggaaggaagtgtggttaggactgcagttagcatggactcaatgcacagtccccactctgctaatcagatcatcacttcttagacctccagggaacagaaatatatttaatgtttatttgagatactttaagttaatagactttatttttaagagtagttttagagttacagaaaagtgagtggaaagtatgaaaagtccccatatccccatcacttacccatctacccccgttttccctgttaacatcttatattagtgtggtacatttattacgattgatgaacaaataatgatgcattattattaactcaactttatagttcatattagggtttattcttggtgtatagttctgtggggtttgccaaatgcataatgtcctgtatccatcattactgtatcctacaaaattgtttaattgccctaaaaatcctcagtgctctgctaatccatccctccctctcactgacccctggaaaccactgattttttttctgtctctgataaaaatcataaaaccactgattttttttatgtgacatttcttccagaatgtcacatagttgacattatacagtatgcagcttttcagattggcttctttgacttagtaatatgtgtttaaagctcctctatatcattttgaggcttgatagcgcatttcttttcattgctgaataatattccattgtctgaatgtaccacaatttgtttattcattcacctactgaagaacatcttggtttcttccaagttttggcaattaagaataaggctgctatgaatatttatgtgtaggctgttgtgtggatataagttttcagctcatttaggtaaatatcaaggaacacaattgcctgatcaatcatatggtaaaagtatgcctagttttgtaataatctgctaagctatcttccaatatggctgtaccatttttcattcccaccagtaatgaataaaagtttctgttaccccacatcttcaccagcatttggtggtgtcagtcttttggattttggccactctaataggtgcatagttgtatctcattgttcttctaatttgtattttcctaatgacatatgatttggaatcttttcgtatgctcatttgtcatctgtacatcttctttgtcagagtgtctgttcagatcttttgctcactttttaattgggttgtttgcgtattgttgaatttaaagaattatttgtgtagattgcttactagttctttatcaaatatctgttttgcaaatatattcacccagtctgtggcttgtcttttcactctctgagcagtgtctttcacaaaacagttaatttaatgaagttcaatttatctattttttatttcttttattttgtatgttgcatctgaaaaatcatcaccaaacccaaggtcacctatattttctcttatgttatcttccagaggttttacagttttgcattttacttttggtctatgatccattttgagttaatttttgggaaaggtgtaatgtcagcatctatgttcattttcttttgcatatggatctaactttcccagcaccatttattaaatactgtcttttctctattgcattgcctttgataccttgtcagagatcaattgactatgtttgcatgggtctatttctaagctttctattgtgttccattagtctgtctttgctttcagaaatatcacattatcttgattaccatagccttgtaagagatgaagtcaggtagttttagtcctctgacttatttttctccaatagtgtgttggctcttctgggtcttttgccttactgtataaactctggaatcagcttgttcatatccacaaaattacttgctatgatattgattttagattgcattgaacccatagagcaagtcaggaaaaactgatatcctaacaatattgagtcttgctatccattaacatggaatgtctctcctttttttagttcttttttatttcttttatcagagttttatatttttatacagatcttatacatagtttattagatttatacttaattttttgttatttggtgctaatataaatggtattatgattttactttcatatttcaatcactcattgctggtagtaggaaagcaattgacttttgtaaattaaccttgtatcctacaaccttgctgtaattactttcaggagtttgttgttgttgttgttgattctttggaattttctacatagacaattctgaaacctgtaagaggacagtttcatttcttcttctccaatctccatgcctttcatttatttttcttgtcctattacattggataggacttttattatgatgttgaataggagtagtgagaggaaacatcattgccttactcctgctgatcttaggggaataatacctggtttctcacctttacttttactgttaaaccctccccataactggggagtgctctacccataattgccttggcatccactcttccttgtttaaggcttttctctagccatggataaggcccagcccataatgtggagaaagacaggagtgcttgagagttaataaagtatcttgtttcttaccattaatgttaccgtaggcttttgataggtgttttctgccaggttcccctctatccttagtttcctgagagttttttaaaatcataaattagtgttagattttgttaaatgctttttctgcatctattgataagtttatatgatttttcttctttaccctatggatgtgattaattacattaattgatttcaaatatcaatcccaccttgcataactagaacaaatatcacctggtcatggcgtataatttttatatacctcattggatttgatttgctgatattttgttgaggatttttttgcatctatgttcatgagacatattagtctgtagttttcctttcatgtaatttatctggtttggtactggagtaatgttggccttagagaatgggttaggaagtattcccgctgcttcatcttctggaagacattgtacagaattgatgtaatttcttccttaaaggcttggtataatttactagtgaactcatctgggcctggttttcttttagtaaattattaattgctaattaaatttatttaatgatgtaggcttattcaggttatatatttctccttatttgaatttggtagactttgtctttcaaagaattggcccatatcatctaggttatcaaatttctgggtataggttgtcataatagtcctttattaacctttcaatgtcaatgcaataagtagtgatggtcccactttcatttctgatgttagtaatttgtgtcttcttttatttttctttttacctggcttgatcaattttattgtccttttaaaagaactatctttttgttttgctgattttatctatttttttaacctttttagtttcattgatttctgctctaatttttattttttttcttctgcttactttggatctaatcggctttttgttgttgttgttgttgttgttgttgtttttactttcctaaagtagatgcttaggttattgattttggatctctttttttctgatacgtgcattcactgtaagcactattttctgtgtctcacacgttttgatacatttaacttttatttttattttatttgagaaagttttaaaaatacaaagataacacactctgtataaccaccaaccagaactgacctttttcatgaccttatatctgcttcatctctttatagtaaaatccagtacagcgttacacataatatggatcttggcttccaccatcattagtctgcatcattcctcaccccttatttctaaatataaccactggcttgaagttagtgtgttcttttcaacccaattacttctactgatttgggttacaaccttaattactcctacatcaacaatgtggacctcaggaagctggaaaggatagcagtataataaaagatagtagcagcagaattcatagatatctgggccagaatgcatggatttgtatttatgcacaatgcatctgtcttagtttgaagtttcttagaagcagactcagggtcagttatttaaggcaaatagtttatttggcagtgcagaacagggaattggaatgtaagacgaggaagggaagaactctgagaaaaagtacattatcaagaaagttatcactttggacaactggagcttaatccgtcttgaaactctgggaggcagcgtagagcacacatggggaagtgggatattcatccgcaacacccatcagccattagttaagagcagacaacaggtgcattgaacccctggtatttatggacatagacaaagtcagctctgacagccaggaagtgcccttgagaggggaggtataggtcctcacatgcagaaatcagacagatgggtgctgacatggtcaaggtgaggagatgtgggcagtccaccaacgacatctgcccaaacctcttattaaaaattccttttctgagatttagcttatttagtaggtatattaaaagaataaaaagtaagagcactatccttactgactacatgctgtgtaccaggtaccggcatctcattctatcctcacagtaaccctttaggaaactgttgttacctttatcttcattgtccaaatgaggcccgtaggggttcactccttaccagtggccagtgccagcaccagaactctgactcatctgcccaggaccccaagttgctgctcatagagtgtggcttcagtaacccttaagaacattcaggaagggaaaggctgtaatggcaaagaaagcttattttgagtcaacttttagagggcaatgtataatgagttctgggagccttttaattaaacatggaaaagcacgagaggttgaaagcaagctgcttaaatgggaaagctaatatttacagatttaaaaaccatgtaaaagtctgaaaatccaggtctctcattaggtgtgatataattactgaatttccatttcctaacagtaaggaaaaagatgttaattctccatccatggattgcatttaagcaggtcttggatatagcctctggctgaagcctgttgtcaagggatttatctttggactttttaatggaagcaagcgttcggggaaattgttctgtaaaggatggcgttactcttattctctgtattcaggtgacttggatgagaagtttgggcagtgaatgtcagaaagggaaagtgctctttatgtgaccttgactcattcttccagaatgtctgcctacagggaaaacacctaggctaaaaacagagacctcagctttgccactagccagctgtgggactttggacaagtctgtagacttctccaaatttagagtgacttttggtgaggtcctgttcagctctgttaattgtacatggctgtaagtgaacctgtgagcaatggagcctctgccaaaaggctttcgcgtgcacctgcagtgctcgtcgtcagctgcagcccatgtctgccaccagattatcccactttgtgtcattaaatggatttccccttggcattaggcctaacacttcactgtggtccccagcatctctcatatgacttggatgagggcactaaaagcatacacatccactttatggatcccacaaagctggagcaatgagcagaaagtaccttgtttagaaagaaatggaacctggacaaacccaagatagatttgagtatcatctgccccacaccagccctgtgaccttgaccaaattcatttgatctccttgagcctcagattctttatctgtgaaatctgggaatacttacctaggagggtgggtgtaaaaatgaaatgagataatgaatccaaatgcaagaaaatggccaatgtagtcagttctcaatgccctcctctggcaaacggggaagggagcaggctcagtggtgagggacgggcgtggtgtcaaattcctgttctggagggaaagaagggtgcctagtgttgtttgctctggagaatgagcattttaggtggctagtccgtctactggaaggaagggaatactgaatggacaggtttgcagagccccaagcagtacgactagggcctgaacaggtgcagttatgggaggcaaagtgttgttcaatagaataaagtggtttttttgccttaaaaaatggcgacacatatacacacacacaaaataaaataaaacaaaacaaataaatagaaacaggaagatggcaggtttaccatcattggaagtatttaggttatgctgggcacaattttctggcagtggtgttgagagaattcaagcacatcttgatggggtgcgatgatggttgttcctctgtgaagctataccaggatgccccatagatagatggtctgcttgctcctttgagccccactatgcttttggaagagacctgtttctgcacttgggactccttagtgaacttaatttctggggtagacttaatccaccttcagatctccagtggttatcacagagtgggtacttcgtgaaggctgtaattaatgaatgaatgcatacatgcgtgaatgaatgtagggttggaaggcagggacatatgacttcttaggtccctctgaccccagactttcatcgtttcatgaacaaaatgagctcgctcttcccagaactgacctgtggatttagcttttccggccttagctggttctaggttctgggggaaccccacagttccagtcatcccttcctcccaaaatgccggatccaaggttttcactgcccctcttgcacatgccaggatggctagacctggtctccaaaccctcaacggtagttcagagccagacacagtgctggaccccatgatctgcgattattttcgcattactaagaacattgttgatattgttaatagctactatgtatcgggtacttatatacacaagtcacaagtggttactttgcatactctgtcttttaattccggtaaccaactgtaagatagtctttataattcacatttttcaatgtgcaaacacaaccttgagtttcagagaaggtcaatggctgattccaaatgcaagcctcgtccgcctgacttcaacaccgtgttttcccaggtgtcacacgatttctctgaaccctcgaatcacagcgtccaacagttaccatttgtccttttctccccagaagtagtcttgagtggtttccctagtcaacattgtatcccagtgtgtgtgtccatggtgaataggatgaggctcccacagtcatggctggaggtatgagactgggttcaagctaccttttggtcaaacctgggccgcaccattcagcagtatattattctgacatccctgttttcccctttgtatggtgtggatgacacttgtgccagtcttcccagaaaatggtcaaagagtcaatgagacaaaccatgcaaagccacttagcacagtcctggcccctactcaaccctccataaattattaggatttgagagaaagcagaaggctgtaaagccattttctcctctcctactaataaaggagagaaaaccacactttgtgggcagggaaagtgcaactgaacagcagccattcagcccctcctggatgtgcaccctgggatggacacatgtagggacctgcctgttttgttcaggagtcatttattaatgaagtgggcaagaaaaagaagtgagtgggcagggagagggaggcaggaaatgggaagggcccatcaaggggcaacatccagggactccatggcggtagaactggatgaaatgcctctcagagttacgtctctgcagtggtggctgcaggcagagttctctaccacccccgatccttggtggctgagggccagctcccctgcattcccagggactgagcagctttgcgaggctttggagagagctccgaggcaggaaagctgagagctgctgctggcactgacagtgggattctgccccagatgtgggatgtgcctcacagccacagtgaaataaagggtcttcctgccccacgtggcgcccaagctctggggccgaagacacacatttccaggaagatcaacctgacagagtcctaggctggggcttgaatcaggaatttagaaaatgccttgacctctggcaggaaaataaaagttctcaagtcttgccagccacagtgctcagcccagtgggatgtccaggcctatggctcttgagctagggtcctccatcttttcctctctttgagcttgaacatcccactaattcaaaaggggctggcagatgagatgaatgagaacttcttcctgggcagtcatgtttgcaagtcttggacttaaaccacatgccttggagctttaggggaagaggaggaataacttgctacagtaagttctctgataggaacctcatcttcccccctgttctgtatctaggggtccaaaccccagcccttgaagggctcccaatagagtgttcattccagatacgctttatcttcaaactttttagaaaggagcattaagtagaaaataaggggaaataaatacctttcttttttaatgaactttgcactcatttatgcatgcattcattcagtattctcatttttttcaagaaacagagctatggtgtccagacctcaaggcattgacagtctggggagagagaagcagaagatgtgcatcactttggaatgggtcaacacaaaacatcaaccataggtgccaagtgagagcacggtgattcagaggagttgggtctctacaagttaatgtggtcatagcatactccttttctttggctcataagaagttaggtgagaaagcttcagacaacatgatggcagtcctctccacagacagtaaactggacttgcttccaacagtcagacagtggtgaaccagcaactttcaaactccagacagctctcatgtaggatggggttgcatccctggcacttgttacactttctttctgttctcacttccaatgagattctcattctcgtttcatctccccagccctgatcatgagacactgtgatatttactgtggggaggaggaggtggcagaggggagggaggttggaggggtgtgggcagaggaagtcttccctctgtgcaacgtcacgtgtcatgttctcatcacacagttgttacctttgcacctgcccagtccccctcacaatatgctaatttcttgaggatagtggccacctttcctgagacatcaccagctcatagagtgtttttgtgcacacttaaaaggtgcccccttatgatgatcacagccttgtgggcactggcttagtgaatagatgataccttgattcaaatttataaaacagtgggctgggttcgatggctcacacctgtaatcccagcactttgggaggtcgagatgggtggatcacttgaggtcaggagtttgagagtagcctggccaacatggtgaaaccccatctctactaaaaatagaaaaattagccgggcacgttggctcacacctgtagccccagctactaaggagactgaggcagaagaatcacttgaacctgggaagtggaagtttgcagtgagctgagattgcaccactgcactccagcctgggtgacagagcgagactctgtttcaaaaaaaaaggaagaaaacacatttttaagactacttctggggttttgttaatgctccattatgtgacccaggtgctgagtacatggttgtgttcagtttgtgaagatttatggaacttatgatttatgtatttttcttgtatgtatgtaatacttcagtgaaatttacagaaagatcaaaggtaaaagaaaacacatattttaaaatattccttcctccagcttggcttggcaagaggagctagtggcaggatatcagcacccagttgcctcttcagtcaaaggtccttgggcattgcacatcctacacaactgtgtatgactattctcgcctgaatcaacatcttacgtctctggggttgggggtttctgtaacagtccttggccccggtgggctttcttatcagtcgctatccacttggtccattcgtcatcatgttgagcctctgtagccctttgagcggagccaatctttatctccttcattgctgacgataagtctgctatgtggcacagtgcagagatgacttgtgccaactcatgagttttgttacttgaactagtcctctgtttttgcaagagtgaatgaatgaaaggttgactggcagctccctgtcatgaagatgttttgaatgttggctgcaaaggcaggtaggactggaagattctcaaggtcatcagaaaggtcacattttcagctgccaataaataactttcaagtggtttcttacagactctgtctcttcctggtgttgtgttcctcttgcctcttctctgcatgcctgccttgggagtgcaccacacagtcatgtcatgcgctggcacctcagatcccaggccatccaaagggaatcaacttggtctctgtttttttcccctagcagtgctagaaatgagctttcagccccaataaagtgaaagaaggaaatgtttaccaagagcctccctccccatcccgtttgctttccttgacttgcttcagtctgtccacatgttataaaacaggattctctctgtggctattttcagaagctcagaccacatctcattacagcgcgagaacataattcaaaagaagcccagctctgctcctgggaaacgttgcgtgtgatagatgaggcgcttaaggcttatcccacaagtgcagtagtgctttttcaaccacagaccaacatttgagaagccaagaggaagacgtggtatactttttaaagaacagggctagaatttaccaagggggagaggttaggttcacatcaaaatctactatctagccgtcaggctccgagcagtatttctgtcctaattattacaacttgttaatggcaaatttagaaaaatgaacagtaggtggtcaatgtgggatcctgtgggggatgtgtgtgtgtgtgtgtgtgtgtgtgtgtgtgtgtgtgtgtgtgtgtgttggggaagtaaggtggtggggaggagagtccttagagaaaggaagggagaatgtgagagtgatggggtacactgggacccttaactgggaaagactgaggcacttggtggagttggaaatagtcagagggaagaagctgacccttctataagaggcctgtggggacattatgttccacccttcatagagcatcatacaggggtcctgggtgaatcattctaggccagagaggtaattgtgctatagatgggatacagctggtatattagcaactgattgaaaacagcttcagcaaggtgatttatggttgggcccagtggctcaaagtgctgtaatctcagcactttgggagacaaaggcaggaggatcagttgaggccaggagtttaagcccagcctgggcaacataacaagaccccatctctacaaaaaataataatactaataataaataaaaataaaaatattagccacctgtaccaggcgcggtggctcacgcctataatcccagcactttgggaggccgaggtgggtggatcacaaggtcaggagttcaagaccagcgtggccaagatggtgaaaccccatctctactaacaatacaaaaatttgcctgcgtggtggcgggcgcctgtaatcccagctactcaggagactgaggcaaagaattccttgaacctaggaggcagaggttgcagtgacccgagatcgcaccactgcactccagcctgggtgacagagcgagactctgcctcgaacaacaacaacaacaacaaattagccagttgtgatggtacaggcctgtactccagctactcaggtgactgaggcaggaggattgtttgagcccaggagtttgaggctacagtaaactatgatcatgatcatgccactgcctccagcctgggtggcagagtcagaccctgcccctcaaaaaaagtgtgatttatggctttggtgggaggattctctataatggcatgtctgcacttgaccccaacaacaccctgatctggctctttgatgaggagaatgtattggtggagacaaggaacatactgttaaccaccagagtctcttgggagcctgaccaagctctggaggtccttgacttctggcctcaggaggaaatttgccaactttccaaagacacatgagaagtggggcgggagtggccgatggagcctggagacagatggtcagtgttgaagttctacttgaggcatattcacaagatttgctttagatactcccaatgtccttccattgccataggctctgctcagacctgtgcgcccaccccacctttcctttctgcagcactctagcatggtgtcacccccattggagctggctccctctccccagatcacttgcagggcctgcccactgtgagaacaacgaggacatcaaaacacacagaggcacaggagagggctttgggggcttagggtgttcccaggctgcccaggctgcctcaaaaaagactgaaaatacacgcaaagtcttcatttactgcaagcgtatgagctaaacagcgccaacactgctgacagagcggtttttccactttacaagctgctatcttcagatgctaatgaattattccttgaagcctgaccagcctagagatactcccatctcagagttcaggaggcagacatgctgggggttaagaagcagtgctcagagccagtgatttagaggcgggtctgatgtaattgaatatttatggcccatggtgtggggagaggctgggcagctgggcttgcctgcttcctgcccatctaaggagtcaaactgtcatcagagtagccggggaagacccatcaatgttgtgttccccaacctctaaacctctgatccataatagatttaaggttcattgagggcatcttttgcactgataatttatttcctgatttttgataggtttttcaggctaatagttcaggacaatgaaatagatatttggtcttgatttcattgtaggatttgcagaatctgttatgctatcattttaggccagactgtgctatggatggtatacagctgctatgttagcaattggttggaaaccacttcaaaaatgtgattcatggcccaggcttggggggactctctataatgccatgtctgaacttgatcctaacaagtttgacatttttacaaatgatagagacttagaaaagttaagccataaagaacttcactgaagacataaaaggtgtaattatcacatttgcaaaagacccaagggttgtaggggtaaccacaaagtataatgaagaaccgggattttaggctatctgcacaacctgcagatgaatgagatgaaatgtaatcaggttaaatgcaaagtccctcatgtaagttcccagaaccaacaatgtaagtgcaggaagggtgaactctgtctaaagagcagttcctctagaaattgcttgtattttctagttttcatcagtgttagtatgatcagatatggctgagaatacacattctcagccactgagaattatagacagagtctaggtgatagtgtcactctcagaactccttcccgctcccttccctccctgtctcttgttctatgtctttttttatcagcaaggcagacttttagtgtcccccaatacctaaccctcatatttcatgcccattcccaagctaagcatttgcaagtagaatggagtcaccattattggttgatgagcaccatgctcggaggaggagaacagatcctgtgagcaaaagcgggaccctgttagagaggaggaaggggacagatggatcttctacagaaagtgaacaatttttgttttctttttccatagaccctgatatagtgttgagtcattggtgggttgattgatcttatgacgtttatttcttatcatcactattaggtaaccagataaacctaatggttagatggatgagatgtgaagttgtggcagatgctatcagtgcccttcccatgttgcctcagcctaccccagaggtcacctgtagatacttttcataaatgtatgtaaacagattcttgcatctgtctccctcatggtatcctttaaccatggaagtatgctcagcataaacatagagagagccgagaatgtctggaaaccaatacaccaggagcaatctttaatcagcgagagataagagtatagtagataaaccccagcctcttcacctcttcatggagcaataaaaggtaattcagcatcctctctcagagcatccccaggaggatcaagccctagctgatggaggtaatatgctcatgaatgtttgggccaccttcggggctctgtctcacttcctcactcccttactggtgcttcctcggatcacccccctaatttcacagtcgccttctgggggaagtcaaatgaagatggaggctaaataattagaactacttggttgagaggctaaaattataagtgtcagtataatatataattggttccttaagtaacgtttattaggcgactattgtgtacaaggaactgcaccctgtgttggatattttgacatagatgaatgagctatgagtttataatgtactggggaaggtaaggtaagtacatcccacccaggaagtcctctgtgctgccaggcagtgaaatctccacaagtcctatgtttgccctttttttttccatctgtatctgtaacacgtttcttaaagttgaaggaaagaccctttagaaaaagagatttgggccccacagttagggtagcctttggaggaacacttatggcaagagaaagaccttttattccttccaggaggagacatacaaccagatatggtttggctatgtctccaccaaaatctcatcttgaattgtattcccataattcccatgtgttgtgggagggacctggggagagataattgaatcgtgggggcagtttcccccatactgttctcgtggtagtgaataagtctcatgagatctgatggttttatcaggggtttctgcttttgcgtgttcctcattttctctttgcctgctgccatccatgtaagacgggacttgctcctccttgccttccaccaggattgtgaagcttccccagccatgtggaactgtaagtccaattaaacctcttcattttgtaaattgcccagtctttattggcagcgtgaaaatggactaatacacaacccattctttaaatctttccacattgctgtgagatggccaggatgtcagtaaccaggctgtcacttcactgcccctctacagctagcaatggctcagacatccactgtcaactcatgaatcccaaaccctagtcattgggcaagacaggctaacagggcaaggaagtgattgtgggtggtgacttcctgccttgggacagctttgacctgggagtcagtgcaacacaccagtcaccaccctgggcttattacactccccagtactcagtctggcaggtacagtgtacagtgtgttcacagagataaaagatgatactgtgactttgtccagaatctctgttaatgacttggaagcttaaatattagagcctgagctttctcttgggattaatataagaggaggcatgtgccagacatggctcctccgtgagctatctgatgctataaaaagaaaaactgcaaagggcatccagaaaaatgtctggacccaagaaaaaaatgaataatgtagtacttactgacctgtggcctgggatgtaaagggaaaccctaatggcgtaatcccagatccatcaactgtggagtctcatattttatgaccagtctttctagttgtggtgaggggggaaatgtggaggagggcagagtcttgctttcagctctgcatctcatttgctgcataacctggggcaaatcatgttaccaccctgagctgtaactttaaaatgaaggaattaggttgggtcattttcaaggaacattttctttttgcatgatacaaattcagactaaaacaaaaattatttatagtctacttacttttcactcaagatgaaaatgctttattgaattccataaaagaaaatagtatttttacaatttagatggtttattctactgaatagaaaaatgccaatgacaaagtcaacactgctttttagcctctgaagcattcactagctgggaatatttgagaagtggtacagtagtggaagctttctaatgttctgccttaaaactggatctctgggctgtcttatgaagccaagcaaatcctgtacatcctgacagccacaaatcactcatgggaccaaggccccaacctcaaattccatttgaggactcacattccctggatctgtggttctagcctgctgtgaatcccatctggaagaggttgagggagtcagctgtgagagctgagcagtccccagagaaagaactacacgtggcttctgcaggaattaccttcagcctgtggtaatcgagagtggcagctccagctatgaggttcagaggtggcaaagccttgggattaggtggccccaggtgaatcacagagcatctggaggaccgttgatgaattccttccccacctttttcctccagaaatttcaggttaaacttactctacagtttcataatgactgtttcatccatgacttctgcaagcctaggttggcagggcagggtgggagctacagtgctttgtaagttggaagttctgcttgagaatgtgttctggacttattctacatcctgcaaaaaagatggcttcaagctcccccctcacatgcacacacacacacacgtacgtctatgttcatgtgtgtgtttccgtattctttttattgttagtttcacttgaataatgtcagaggcaggctttgcacccaagcccttaagggtaggtatataaaaattattttttagcagactgtgtttttaaaagtttcagcagacttggtttttaaaattgtcgtaaatacaaaatttgccgtcttaaccaattttaagtgcacagttcagctgcattgagtacattcacattgtctgtgcaactgtcaccatcagctgtctccagaatccttttcatcttgcaaaactgaaactcatcaaacaacattaagtaatcactttccatttctccctcctccctagcccctggcaaccaccattccattttctgtgtgtatgaatttgactactctaggtacctcatataagtggaatcatacagtattagtctttttgtgactggctttcagttttatccgtattgtagcatgtctcagcaagtcctttctttctaaagaagaatattccattttatatacatcccacattttctttatcccagactgtatttttcacagttgactgagcagtctcttttttgttgttaatacataccctatggccatccattttttaaataagaattgtatttaattctgtggaagcagcagaaaaagtgattttttactgtgtgagcattctcaagtcccttactttgacggacttaagaattataacttgtaaaacttgagaacttaggactggttaacccacttgttttagcccattggagtggttaagatagtagtgttatagtcagatttgcttagaactcacttcccccctccaacatgagccctgggatcattgaaatattctgagattttggaggacttgagtctcagcacctacctgtggggactgcaagattgatatgtgtgatacatccttcttggttgacttgaattggttgagatacctggtttactgagctgctttcaatggaaaatatatacatacagatatattttaaagagatatttagcataaccctaaacatgttggccggtcttgttatagtcacaagtatcttctggtctccatttagtgcttccctaacatttcacctgccaccatgtgcctctaccccccttgcaatctaagcctccatcagataaaaccgtccagtatatgtggatggcccgtggtctcttgacctcccttgttagtaactggctcactactattcttcacatcttctggttgtggaaggaacaggaacttggacatgtgcctgacacattttgctttcaagttctgtatgcctttgagacatcacgtaaatgtttattgattttcattgcatagactgtattgacatactgcaatattcaatagaaccttcatactatggaaccttagggagtggttgttcctccatccaaatacagtgtgtgagctttgctaaatatttcataaatggtcaataaatacttcttttaatataatcagtgtgatgtctctctggaagctgaatataggtttgtgatctccaggtggcctgagagagactcagggaaacccttggggaatcttccttctgctggtatcactcaatcacctcccacccccatttggaccaaggctgagatggcaaatggcagacgagcctggggttctgcccttccttgcctctgctacctctcaaatatcaattgtgccgctataaatctcctggaggtcttgtcactttgcagattatgacacagtaggtctggagctaaacccaaggccctgcatttctaacaagctcctaggggatgctgatactgctggcccgtggaaagcaagatagaaaagaagtgggccagggtgagggtgaggcgagggatgcatccaggccacaaaatttagggaggcacctgctctcagagtcatccagctgctcttagggaggtttgccctcttggttggtgcaggtgtggacaggcacctaagcgtgggcgacttcttaaattttgcgcaccaggtacttcaggcacctctcactagtcctggctctgaaagaaagatatgggtccagggatttgaagtctgttgtgctgtttgccctgagttaccctataggccagtgcagtagatacctctgcctgtttgaccaactatgccccgtctttcctgctccctgagccatctgtagacagagacccgggctcatgtaaacgacccccacagcctaaccagatgtgggcaggattctctcacagctgagtccctgtagctgcccagatagtgcaatgttttaaaaagaagacttttagcatgatttcttctgcgtgctttgtggtgcaatgtgcatgatgtcctgtggcagcaagcagagaggatgcagagtgaattagcagtggggccatgactcaaacccaggcagtcccctgactcactgtgtcttaaccactctactcaactgttttatttggacgtgtttccctccggggtgtttatggtggataatcatgttctcttcagcatgttagccgtatggaaggagagactgcaaagcctcatactgcaggccctcccttgttcttttacctactttccctctcctctttgtaagtctattggcatttagtaaaattaagttacaggaaaaaaagaaaatagaaaagagctgttagccaacagttgaccaggcctcctccagttgtggactttctgggagggtccccatgagtgaggggaagggttttaattttcctggtagagtcatgtcctagagaagaccaggctttggttgttttaaagctaagcagttttattagccagcggagggattgggggcatcttcccatagcacattgaggtctccagtttctggaagagatcaaggtgaggctgacggacttccatatctggagaaagcccctgatcatctgccttttcagaggctgcttctcagctcaccctgtgtttgttggctttaaaaaagccaaacaagccttcagggaggagcttaagatgccaagcctgagttcactccatgttctctagatggtcttggataagtccctgtcctccaccttaagtttggattttgtcccaagaaagatttgattcttatttcctttaccagaagaaaaatgggaaaagaaaaagaaaaatatatatatacacacaaatatacatatacatatatgcacatatatacatatacacatacatgtacgcacatatacatatatgttcacacatattatgtatagtctgtatataatatgcatgcactgggcacttattattcgccagatacttgtctacgtccttttcttttcttttttttctttttttttttttttttttttgaggtggagtcttgctctgtcgcccaggctagagtgcagtggcacaatcttggctcactgcaacctccaccccctgggctcaagtgattcttccacctcagcctcccaggtagctgggataacaagtgcgcaccaccacacctggctaatttttgtatttttagtagagacgaggtttcaccatgttggccaggctggtctcgaactcctgacctcaagccatctgcccgcctctgcctccctaagtgctgaagttacaggagtgagccatcgtgcctggcccccaagtacttcatctacctattttgtttatgcctacaagcaatcttaagggaaagtataagcattttccccatttatgagaggttaagtaaagtctctcaggttaaacaaatattcagtggttggtcaaggatttgaattcaggcgttctgactccagggtcttaaatcatttttttctttccaacttttattttaggttcagggagtccgtgtacaggtatcttatccacctcccatcctgtacatgggtaagtgcatgttgcagaggtttggtgtacacattatctcgtgtcttaaatcttaaccattaaagcagtagttctcaaactgtagttcccctcagagccccctggagggactaggaaacccagatgactggactgctgtcctcagagcttctgattccgtgggtgtggggaggcagatggcgggtggctttctttcttttttttgctctctctgttgcccaggctggagtgcagtggcacgatctcggctcactgcaagctccacctcctgggttcacgccattctcctgcctcagcctccctagtagggactacgggcgcctgacaccacgcccggctaagctttctaacaggctcccaggggctgctgttgcctggggttggggcagggcacacacttgagaaccactgccctggacacaacccaaacttgggagaaagccccaaaactcagtgagcaacttaaccgacatggtgagacctgagtccccgctgggatgagcctgggagaggcgtccctttgcctctggtcacgtgcttgtgcgctcctggcttgatgatcatctgagagtccatgtggagtggagcttttgggcttctgtccagccagagagaggcccaggacacagccgaggcttctcattgccatcaccatgaagtcaatgagaccagagctgggaggtggtgagtgcagatggaaatgcattagcctggagggggcaccatagaccccagccctgccttccacatccctagcaatgcttttccacttagaaaaggtggggctggactatctatccctggcagtttggaatttgaattcaaatgtatcaaattttcacaggtcatagtttgagattctgtttctaagtgcctgtcccaccctgccttaagaaaatgtgtcttatccacctcctatctcttcactgcccggggtctggtcctgcccactctttccagtttcccaaggacttctatgtaagtttctttgttcagttagcaacatattattaacctcttttcctgtaaataaagagaaatattccatagctttcaataacggtgtgacatttacctgtgtggaccctttgtctttatttacttagacttctcttatgaggcactcacgtgactcctgttttctctctatcgtaaacacactgcatccttgtacattcatcttgccttataacaaattcctgggagcgtattcactgggtccagtaatgacagtatttccctagtgaggtactcaagggcgcaggtgcccaccagtctctcgatccgttaacatttcagtcttggtgaaataatgtcacaggctcccagaatccctccactgaaacacttattcctcaccactgtgtttttctattcgcaagtatcaaggcacaggtgagcttttgatgtcttttccatgacttgtttcaagacaggtccccgagtgaatgcagagcatgaatttgaggttgtcctaggatgtggatagagttgggtcatgggccatcagtcagttacagtgggaactgtggtgggctagcccggactcaagggcagaaagtccttaacagccctgactgaagagcacaggatgtgcacacaggagccctcttctgggccacatgtgcggattgagaaattcaggggaaaacctgacttgcggaggtggccagaaaatggaatcagggctgagaaagcagggacaggatgtaaagggctccccctggctaggctgaggcctcttgggaagggttcagcgcaggttgcactctccttgtcacctacagggctttcccaagattgctggggggcagccctggtagtgggtgggaggtggccctggtgctttttctgcctactcttaaagccctgttgaaaataaaaggcctttcatacagagcagcccagccctgaacacttgtgaaataccaagaatgaaatcgcagtgcactgccacctaggccattggaagttagtagtttttattcaccagtgaaaagatcagtagaacctggagaaaggtgtcatgaaaggctcttcatcacagcagctgtcaggccttgcccagccttctcgccaacactggctgccagaaatgggctttcctatgtcttcttagagctggaccagtgtctggctcagccactcctgccacacagctctggctcttcgacttctgggctctggctcatgacttccttgccttcctctgtgactgcccctcaggactcctgaggctctcagttcaagagcacatgcgtgcatattaatgcattcataccacacacatacgtgcgcacacgtgtgtacacacacacacatgcacacacacaaagccagtaagagaggttgtggatttgagcccattcacgtgcatgctcacaaagccaggaccgaagagagagctagagtcaattgggtaaggaatgatcacataaaactctctctgctttagatcaccaaacggtgaactcttcgtattctcactcatttgctgtcagtgattttttttcttcctgggcctggtgtctggggcctgtttgttagtacttaatgttgaaattagcaacaatcatagcacagtctacatacagagtacatttgtctcagcaatttaaagctccctttttagcaagcctttaagtatattgaggtcaagagaaaaaaaggagtgagtatgcccattttacaggttaagaaactgaggtctataaatgcaccatgattcccccttaccccagagtacgatcatgggtatactttggcatttgattttcctttatgtctccagccctagtcaatattgtctagcatcagttggcaggatactgcaggctgacagcagcgctgtccagtggatctttctggagtgataaaagcactctgtgcctgtaccatccagtatgatagcacttgccacatgtgtggctgtggagcactcaaaatgtggctggtgcaactgaaggctttatgtttaaattttacttaaatttaactcatttaaatttagatagccacatgtggccagtggctaccacactggacagaccacaggcagagagcatgagaaggaaaaagtccttaccagggcagatttcacggagcgatagccagctctcctcggctcatttacattggagatgccatcagggcagcaagttgggagggtggagaactgggaactcctgagaggcccaggggtctgaggacatcattgatagccaaggaagtggacacagtgcccagtcctctcagagaaacttcccatttggaagagttaccccagcagggctggagaatttttttttttttttttttatcaaaacacaaaaactcaagagactttttactaatgttctttcacgtggtttgctagaatgcacatttgtttgctacaatccagccaatgaacaatgaaatttatttaagatgcttcctgcaaaaaccagagttgatgatgtgccattatattagtgattctatagaacaggatccatgtgatcaactcatgcatgagtctgggggcttccgggaaaacaagttatgttatctctgcagaccaactgtggcctcctcttagcagacaaaattgatgtggctcagcaggttcccctttgtcatagatgtcagaaaatgtacaggcaaagtagctgcccaattgcactcagcagttcctctctgtgatgtaatagaatctcacgctactttctctgggcttgtgcttctaccactggaagcacattagaatcactggagagctttccaaataacacagtgaaacccaggcctcatcccaggataattaaaccagaatctctgcatgcagcctgagaaatgacatcttttaaagccctctaggagcttcttctgtgtatccagggtgagccagtcctctttaggtagtcattctccttgtctccccagctgtcttattttgtatttgatttccttgtgaactgcccaaggtccatttagaagtacactgggataaaccttaaataaaattctatagtgtgtttgttagacaaagtacaaatgtattttcactatgtagagaagtttggcttttcttgaatgtaggagtctaaataataaatctgaatagaatttctgtgaagtgtcaaataatgtcattatttcaggttgattcctcccatacctattccctgcaatagttcttttagccacaccgtctgattgccacaggaaaggatgctgcagacctctcctgagtggtgattaagtgaaatgcaccaaagaaatgaggacagtgagcaactaagatgcctgaagcaacactggaaagggagtcaggtctgagccacctctttttgcagccagtgtgcagtggaagtggctcgtgggtgttccatatttggattggagagcaaagcataatcccagcgctaagggaagcctcttatgcttctggaatagtgccccatacttccctgaaaaggtaataaaatatgtgcattcgctgattaggaacaaatgtcaaagcgtccaccatgatggaagtgtccgatttccatggctctgataagtcgccacaggatctcatgaatctttaatggctggcctatatttaggggctttcagtttctgagggtggtaaaaggtccacagagatgctattctcctagcacactggcttctgccaagaccggtgtctatttaaagcacctctcgtctttcgaatgtacagagattctgctgacaacaagaaactttcttgggcctgaaattagatgaaaagacctcccactcagaaagtgtttattaatttatttaaaaatatgatctggatcatccactacatgtcagggcttattctgggcacactgaggaataagacagggtccctgacctctgagcttgcattctagttaggggatacaggcactaggtaagaaaacaaataatcgaggtaatgacagtacagggtaattgctatgaaaagaataagccgggcaatcggatatcatttaagcacagcagtgacatgagcttatttgcattttgaaagatcactctagctgttggatgggaaaaatggattgtagggggataaaagcaaaagccgggaaatcaattaagaggccattgagtggtccagggaagagatggtagtggtgatagagatagaagagagcagatgtgcaacatatatttgagaatgaaagagaatgtgctggtgattgggacagaatcgcagaaagaaaagaagcaagaaaaactccaaacgggtggcttaaccacttggtggattgtgacagcatttcctgagacagagaagactgggttgtacatataaagaatagatttgggggaaatttcaagtgtacagtcatctaaattatccaagtatggctattatctaagggtagatatgcctagagtctggctagaggtcaagcctggagatactcactttggagacataagcttgtaagtggtactgaaagctagagctgacctggaaagacaactcagttagaaaatgagccctttgaggctaggcatggtggctcatgcctgtaatcctagcactttgagagcccgaggagtgtggatcacctgaggtcaggaagtcgagaccagcctggccaacatggtgaaaccccatctccactaaaaatacaaaaattagctgggcgtagtggtgcacgcctgtaatcccagctacttgtgaagctgaggaacgagaatagcttgaacctgggaggtggaggttgcagtgagctgagatcacaccactgcactccagcctgggtgacagagtgggaccctgtctcaaaaaaaaaaaaaaaagccacctgattcttcaccctgcagcatccaggagcagaggtaaccaagatggagcagccagtgaggtatgtcctagaaaccaggaagagagagagcttccataggaaagagtggtcaccagggaacatgaggttggagaagcatcattgagatgttcagcaccatggagcagacaagagcagtcttagagggaagttttagagtggaaaatggattggatgggtcaagagtgactgtaatgagaaagtggagttaagctttttcaattttgtctttgaaaactagagcacagatataagatggtagctgacagtggatactgaacaagatagggatctgtttgtaagataagagatatttctgaatagagattccgtagcatatttgtttgctgatggaaatgatggagtagaaagggagatgttaatgtggcaaggatgggggagctgtcagaggaaagctctcaaaaagccaagggggtacaggcctcagaatccgagttcaccaatacacttactaaagcagcagggacatttccattttaacagcaagcaggagagagtatgggtatagagaccaggaggctgggagatttggtggagaaggtgaaaatctcgtcactcctattttcttccaaatataaggcaaaattctgagtcaatagagatggcacattcaaggagagagaagaaagcatgaagcagtcacctctaagagcagggagcaaacatactaagaaaatgtggtctgattgcccagctctgctggtgcccgttggagcttccatggcctgtttaggctgaggtcagctagctcaggcttgttgtcttctctggccacataaattgctcggatatggcccagattaagtgtatgttgggtttaaccatggcctgaagtttagccagctaagtactacctgagatgagaggggcaaggaggtgagtgtatttgaaaagaagaaactggaaggatagacaatgggatcttgtgggcagccagtgcagtaaaagtaggaagggaacggtgggtaatgaaaagagggattggagccctgagggttctagagtgaatggcctggacagatgcaggagttcagagagatggatacttaacaccagcatgtctgatgtcatgacgtcgtttatgataacaaagggcaatgcttaggaggggcagagagcatgatcattaggaaaaatgaggtcacggctctggatggtcatctccatggatcctggcatcaccatgattgtgacagaagcggacggatgagcagagaccaagcctggggatgaaggatgtgcatggggcaggcaggagatgaggaggactgggaagggtggcgtaggaactggatgacaggaacttcaaagggtctgggactcgaacaaggagatggagaaatggtttggtggcagcagtggggagctttgatggaaattaaaattatatgcattgcttgagttttctcaccttttaggcttggagacactgttttagttagtactatagaagcttcttggagaacaacatgttcccaagccgcccctggtcaacctgccatactggagaaattccagcctgcccacagtgctaagcagggagcactccacgtagctgcatccactgttgggtagcccagagtcaatgttgcatgatgccttcatctgaggacatccagtagacatcagtgacctgaggaccagtccagctctgccagtacattcctgtgtgactttggacctgtgactccacctcagctcactgatttgcaaaatgagagtcaatgtacttcttggcttcctaaatccattctcgtgctagtcttccatgatgttacatgtctgggtcggggaagagtggcctgaggtctctatccattaagctttgggaaaaactagcaagcacaccatcactttatgaatattggcaaaggaaacggctgtggtcacatgcccattcaagcatgtcatcttgccaacctcgactcttcaaacctaaaattattcccatgcaagggtgacacccatgttcatactaaggtagggagtctgcccacatagacctcctccctgcaaacttagaggtgctctaggttcagccagggacccttgcttgagaaccgccggcaagctcaggtcgttcccacagttttaggactgtgcacaagtgtgtgaagatgccctgccacctgtgttcctgatcaattccttggcccattcagctctgcctgtcttgtcagccggttagagatttacactggagaccaaagtcctacccccaaatgttcgtgcaaatatcctttcttttccatctgctgtacaaccactcaatgtgtctgtttcccaaaagtgaagcagcctcaaatgtggctcagagatgacaatacccaaattagagataggaggctacacagatccctgagcagggctgttatctcagcaactccaggtataggattttagggccaactttttttctctgaaaagggggagggctgaaactgggaggccaggctgcactgcccaagaatcaacagagtgttcttctctctcccaagtatggtttgctcagaccttaaaatatggatgacatcagagtctggggaatggtcactcagatgcacagcattaagtctgtacgctgaacttctccccctcctttgcacatacactcgggtacatgtgcacacatgtacatacacgcacacacacacatagacatgactactattggctgatgcgctgacattaaccatgcaaaatgccagaaattagacgcagaagaagactttgacccactcatttctgtgtttctgtgcataacacaggacttggcaccaagtagatcacacacgtatgcatgttagttcattcctttattccccactcacatgttagtgatgtgaaactcacgtagacccagacatttagggaggtgcaggctagctgaggtgcaaaacacacacaatagctgtaacaccagtgtggtaagtaacataagggagatatcagcaaaacactgtgggggttcgaagcaggatagatttctcctaaaagaaggcatcaggagggcctcagagggagacggcacaaggttgagcatctaagattcaagccagcagactgagaaaggacaagtccccagcagagggtgtgtcaggggcttggagaacatgtctggggttctcaggttgctatgtggtattttgacgttttggggtagagatgtcttgagggcttgaagaagaagcagagtaagaggggagcccccgtgctggagctgtgagtgatgatctagtggaaaggccccttcagtgtttggcgttgctgtgcacctctcgtccatgagagatccccagatttgcccagtcttcgctctaaactgctgttttggtcagtccatgaatatggtcctgacagattcacagaaactgcctcagatttcagccttaacgaatatactatcaaaatcaatgtggctccaatttcttccttagggttcattgctaatgcatttctctttttgcactggaagctggaaagccagatgccgtctctgtgaatgtttctagatgttgaatgcatgtgtgttcaagggagtgggggcaggggtgtccagataaaatggctgggtgggagaagtccctatttctgtggtataaatacccccataatggccaatgtcaagacaaggacatttaacaactagcccataacatccctgcatgtttctacttggccctcagaagctggttcaggatggcttagcccatcactctgtcggggaagagtgggaatgaagaaaagaaagtgtgtagtagatagaggtggcaaagtttccttccctccataccctgatgtcccctgcagcactgtctataattagttgcttttttaattaaaaagaaaaagttttaactgaatggaggcagccaatttgtctccctatatccaaatttcaaacggttcctttaaaaaagagcaacatttgaaaatcgaaaatatgaaagtaatagtctgcaaatctctgcatgacagagagattattgctttacaaaggaatttgccatgtagttctttaaatcccaagttctcctggggttttaaaattattcaatttttgcaaatatttaatgtactgtttcttttaaaattcctgttgtgtagagcagaagttcttaatttggggtccacggatccctggaaggatccactggggtgggagtttaggaacttggtgaacgctgtgaagtggtgcacttgtgctttccctatggaaatggtgggtagctttcaacatatttttaaatagatccttcacttgaaaggtaatgacctatgtcacctgcctgggggccctgcgttatgcacataaaaaatgcatgggtggtcaactctaggggtccagtgaggcgttttaaaactgaaggcacatttaaagttggtgcagatttagtctatgtaatggccttctttaccttccagagaaactgggcttgccctgggatggcaggtaggatgtaggctttgctagcaagcctctgccacagatttttgataatgacaatgccagtgatgaggacacttcagcttcacacatgtggggaaggaaaccaagccagaagtcaagtgtgttacttccctcctccagccatgaggacgctctacctcattttcatctgtgaatctccagggtcatacccgtttccttcaccagaccttcgtgggaactctggaatagtttatgtcaatctcctggttaactaggggagccaagacctcctacactggctttcctgggaactgcaggattttctgttggatgaacgggattgtggacgtccccactaccgttgcctgaaatacaggggtgtgctgtagtgagtggggtaggaagagaaaccaccccattttcaatcatccacgttcacacccttgggcatgcggacttcctgggcccctagcagggttcccctgcggctgcatacagggccggcatcagcagtggtgggagctgcttgtaagaacgaggctgggaagggaacaaggggtgtttagcccattgaacagcacacttgctggccactgggcactggggttgctagctggggttcgggggccactgatcaaggctggatcagacatacagaggccgctatgcatctgataccagagttagtatttctggcctctcccctccttcctgaacccccagaaccctagctttgccactttcaaagccaaagatcttgctcctgagactcggaggtttagggttcttttatgtttgctattgttatccattcagcagaacacgaagcttgtatctgtgtggctcttcaggattttaaagcacatgttctttagaactctgtaaaacaagatagagattatttatttacattataaaggtaagaaaacagaggcttggggtttatggaattggctaagttcagaactctagattcctaactcacaatgcaccacactgcctgcccaggagagataataacaatgatgaaatagcagtagtggtggtggcggtggtaataacaacagcaatggcgggtaacccgccttgagcacttactggaactacgttaagccctttctgtagctttctttttttcatcctacaacaatctgtgacatacattaagtactttattcccatttctgaggtcatgtagctggggaattggggagccaggatctgaaccccggaagctgaattccagcctctgagctctctctggcttcatgaaccacctccttgtgtggtctgtgtagttcataccagactctctcagggacaatgctgtccacagagggtctggccactgctatgcagaggctgatgggctccagtaagcgcccctccaaggcagtgtaggtgagatcgggctggcccaggcctttgccccagtgacctctcactgtcctttgcaatcagatcagtccttaattctgtggtttggtctgcagagacttctaattaaaagatgggttttctaatgaacttttattaattcagcaatctgtctggatgctgaattgtcatttttgctaatagagaaaatggtttggtttattttccagaacagtgaaagtcactcaacttaattaaactgtcggaggagatgttctacttgtcttactcaacacgggtccctgagggagctcgcttcataaagcctgtcagccgcagtggcaattccagtctagcttttcttttgaagtcaggatggatttggtgtcagctacttctaaaattccctgtctggtctccagcagcaccagcctgaagcaaggcacagcaggacggtgtgcacattatatgacttcaggtgatcaagaaggccctgtgtcccccggggctcccccacttccctgtgcctggtatccagagaatggtggagggaggcttttaattcccaatgcaagaagactgcacaacccggattttaaaatctgatagcgagcacctgaaaagaaaattattaaaaattcagaactgttaaggaaaatactaactacatttggcaatacattaaaagaatcacctctcatgggcagttaggggtttatcctggtgataccaagactgattaatggtagaatatctaccagtgccatccatcatagagctgggtctccgtggagaaaaacactatgtgaaagaaaaatattttaggaacatttttattttttctgtattgtatgtatttagggggtgcaacaagatgttttgatatatgtgtatattaggggatgattaaatcaagctaattaacatattcatcacctcatgttggaatttttttgtgtgtgtggtaagaacatttaagatctactctcttaacaattttcaattgtacagcatctcattactaccatgctctacaacagatctttagaacatattcctcttaactgaaactttaaaccctttgaccaacattgccctatccatttctcactcccccagcccctggtaaccaccgttctattctctgcttctgtgaattcaacttttgaaaaactgtttgatgtggaaggaaagggtatcttctgatatgaaaaaggctctctgacactaacagttcacaatagaggtgaccaggaaatacacacgccccataaaaatcacatccaggctgggcgcggtggctcacgcctgtaatcccagcactttcggaggccgaggtgggaggatcacaaggtcaggagatcgaaaccatcctggctaacatggtgaaaccccatctttactaaaaatacaaaaaaattagccgggcgtggtggcggttgcctgtagtcacagctactcgggaggctgaggcaggagaatggcatgaaccagggaggtggagcttgcagtgagctgagatcgcgccactacactccagcctgggcaacagagtgagactctgtctcaagaaaaaaaaaaaaatcacatccaaggcagagaatggccaccattcccatttccatttaccgttttaaagggcccaatggatggctattgtaaatacaaagataactgctattatttgcagataatatgatagacctagaaaatcatgagaatctagtgataatctcttaaaattaataagaaagtgttaatgattgaacataagataaatatgcagaaactaatagttcttccagttactggacatgaccagttagaagatacactcaatcttttatttgcattataatgacaaaaaaagaaataataaaataaataggaattgactttaatcttgcacaacctatataaagaaaactattttaattagtatgtgttcttgggtgaaggatggaaacttatttttaaatcattttttcagtttaatttaaaaattccaaaaatttatttttagatttacctaaagacctgaaaatattctgatggagagcaacaaagaaacattttcttcctactctatacttggaaatgtgttttgggttttattaaaactacagcatcaaaccaaaccaatgagtagtgtgaaggagatagcccagaactgacattaggacttgagcctaatctataacaatgggaatagccttggccaaatcagacagaaggacagtttagcaaagcatgtgggaaaataggcaaatgacttgggaaaactcactgtggatgtaacatcctccttgatctcccattcttctgtcagacccacgcgatccactcccaggccggagagctagagtcctctgcctgcccaatgtcttccttgctggtgttgcagctggttatataaatgccttcagagattcattctggtgagcaattgatattaatctgagatgttggtagttaaaaataatatgtccgagcttgcctcaggtgtaaatcctggacttgatgaaaaacagaagtaaggccatccctgatgttcttactggttagcgaatgacttttcttcctgctgtgcaatattaaatgtaggcctcaatgtaaaatgcaaaaccataaaattcctggaaggtaacataggagaaaattaggtgactttaggtttggtgatgatcttttagatcaataccaaaaacatgatccatgaaaggaaaatttgctaagctggctttcattgaaattcaaaacctctgctctgtgtaagacaccatgaagagaataaaaagacaagccacagactaggagaaaaatcttggcaaagtacatgtctgataaaggactagcattcaaaatatgtaaaactatacaacatattgtcggagagagttaggtgaatgcttgaagatggttgcttcagaaaggagggaaatccagttgaaagtatggggccttccgtagcaaggatgtcagtgtccataattatgggaacccaggcagggctcctctcccaaagcacaaaaaattccagaggcatccaccagaggaggaacgatagcacagcaatgcctgcttgctcattaatcttctctccctctgattcttttgccctcctctctcttctgggcactataagggcattttcgagacttagaaacaaataataatgcaaggaaggtaagggctcgtttttcttgctgtgggtaaaccctacgggtgtcagctgagctggggtgggataaatgcaagacgaggactggtgcctagccatagtaaggactgtggtcctcactctgctgacagctgagctgacacagggctattaaccaggcagacgcaagcagaagagactgggaaaggaagtactccttctttataatggatccagcaggtggaactcctaggacctgccagatggcaacgaggtgaggaagagtggaggcactgctgaagcaagcaggagatgggcctccaaatttggaaactggctggaccctgggctgggtcaagcctgaggaggccaaaagattccagatcctctgttctgagcttgtgtggatgccactaacgtttacaggaataacaaatccaggagaaagaggcaggtgtttgcaactggtagaacctgcagggagtagatcgccaatttatttggaggcaagctaagtccaaaaaaggtgagattttaatagcagataaagtcattacccagaagtatttttgagctacaaaatttctcttccacagtgtaagtgtgtggaaggaactcaacagagagagatcagtgcttcatccagagttcagcatcacagacaccacagtccttggataggcagagagtttttggcttttggttcaactctggctcctcctggcagtgctatcctggcatgagggtgccatgtgccatgtacctaaagtgtcgatgacatcccaattaaggcaaatggcttgattatggtcttgctcctctgacaatttctcccatttgccagtcttacacgtgaatatagtatacactgtacctactgactctaccctgtgtgatacaaaaccattaagacttgatccaaaaaggaacaaaatggctactattgggttttgcaggtattagaagtgaatgaaagaatgggttctcatcttcacaaaggacagtctatactggaggataggaaactatccagaaatagaatgcccaggtccctggacatcaattccccctttcgaaagccatcaggaatcccatcctcgctgctagcaagaagtcctcagtcattctcatttattgccatctgtcaccttggttatttgcagggatttcatttagtgatctgaatccagagattgtccatcaaagtcaggagccaggagatgaccttgtgtccctggttctggtcctgtctcagccttcctgaaattgataactggcattcccctccctctactccctgggagaaatgaagtgcaggctcagagccttattgatttcccataacaactgatggatctttagggctctatttttatttcagaagtggccatctgacctgatcaggtctgtaaatgagctgataaaatgtttgctgctcttgttctcggcatgatctttcgtgctatggtttttttcttatatttgacatagagtatatccttggggtttaggtacatcctcttcttttgaggggagcttttctgaagtgtaacctcaaagacagtttttaaaaggggactgaaagaaccacagccccccatccattgtggtttgactaatccagcttacaaagctacagtgtgcccatgtgtggctgtgtccccagcaaccagcagtgtttctcagccccttttgggggaagggtgagcatttccaccaacaagaggagtctgggcccatgaccacactcgagagcttttatgctgtaaaagaaccctgcatgccttctgtgtccgatagataagtcgaggctcaccaggccattcaaactctgcccatctcattcatgttacatgatgaggaactgcaaaccaagtgcactttgaggacaggagttgtctcaagttcatctgcatccccaaaataaagcccagtgtctggcagtcaccccagtgtcaatcaactcctgttgactgaacaaaccagtagatggtcttgcttgtcagtggcaggtctccttcaaaagcgaagcattgttcttgttctcacacgggctgtggaactttctctttcctcctccacagaaagctgctctgctgtcccttagcatgtagcaggtctctgaggatggtgtggcattctcccaggcttctaacaggcccatgccatgctcagtgactgactacccctaagttgaaagatcagtgcattcagagagtcatagagtaccagttgtcttagcctttcatggctaacacacctccacatgcttccttcctgccaatgtccacttagtttcaccaccttcaccaggaatatctgactgtgggcgagccacaggttaattactcattgcccatcttccactttacccattttgcacacagctcttcttggctttgtaattgctccatatctgtatttacgagtgaaacttgcacctctagactggctttcctgacatctccttgaagtgtttcatacagatcttctgttctcccttctcgcagttacagaatgaaaaccatcctcttttctcatgctggcttggaatggcttccccaaggagcaaacccctgagtgaagattcaagtgtcagtggtttatttgggaggtgatcccaggaagtttggtgtgtgagtggggaagagagacaagagagggaaaggaataagattagctgtgtgagtgagtgagcagattgcttttgtgggcaaccaaagctttctccagctggagagctctgggagacagtaggggaggggaaggctgtgggttttaccctccagctcccatcagtcattggctggagctgcatcaggggcattaacccctagctctggtctgtcccattgtcccacatgttggatgaggaaaggacctcgacacttgcatgaggaccatgaatgcttaaggcacatggttgggacactgacagccccagctacactcaggttttgagaaccttgaaagaaaattttaaagggccttggcctcaatacccgctcattccagggacttgaacaagctgctgaaactcagtgagactcagtccttccctctatcaaaagggactgttgtgatgcatatttcatatagtggttgcaaaatccaggaaatgcatatgaggtgcttagtgctggcctggctaagaaagcacaaatacattagattcattaacaatgttataatcatactcgttttttgctacctcttttggactgaaatgtgttcagtatggtgtgatgaggtgtctgctgcatgcagcagaaagttgcagttcctaggagacagagcacttgggtgcctggccttaagatgagtgagctaagagaagtcatttcacctctctggggctgttttctcctttggactagaggagaggttctaatcattgatgattctgtgaaatggtcactcatacatataaatatcatattctacattgttctcttggcttcccaaacccactcttacccagctgagccatcctgcctttgggactatattacatcattacacacacagctgcctgaattcggggttaaaaagttgtgtccagtttgaggtgcactattgcagaaactagttggggtcttgcctaccatgttgcctacctgacatgtggtggcatcctctgccctagacttggttccatgcccttgtctgacaactagcccattcagctcctggaaccctgctcacagaggagaccagaacattctgtagactccatgtaccttattctcatggttgggagggcaactctgtgtgctgatcttgcagaaagggggaagttccccaaagaccagttggcttatctgagtccccttggccagtgaactcaatctaagagctgggtttcttgttcatgaatatttgggtcctgggacactgatccttactggttttattgtcctcctgaaaggctgaaacagcagaactgagtttagtaagcccagaaaaatccaatagaatttaacaaatacatattgactaccctatttaatacaaaacctctaaaaatactttgggttcttgacaggaacattattaatgctcatttctctcactgcccactgcatgcctggacttataaaatttgctgtgactgcacaatcatagaagtagtggtcattttggagcacattcagggcattgcgacaggaacttgggaaccaaatagtaatgagaaacagcctctgcccacgatgagtttccagtccagaggaagaaatagatagtataggcaacactctcaagagaaggtgctacattgctacgtcctggcttgtcagtgtgcccaaagtatgttgaagaagatattaaagttgtgataataataactattgagcagtgactatgtgctggacacccgttttagcacttcacacgtactagtgcttagtttatacagccctgtgaagtgtatgaggccacagccaccatcttagaaaaggaaattgaggcatatctggtctaaggttgtccagttggtaaatggtggagtcacagtggaaattcaggaggctggctttagactcaacagaaattccatcccatgaataggagaagaatctggcagagattcaggaaaattcacaatgactctgacttcagctgggtgcctggagaaacggtggtcccacaagtctacgaaaggactagtgggtctccaagctgggggagagcagagtgagtctgatttgggatgagcagagtttgatgttggcaggacagctggggaaagtgtccagggggattccctggagaagtcatgaaagccagatcagcatttcattccacctacagagagcccggggagtgctccccgagtgatcttcctacagagggcccttttctatggagtgagtgcaaggatttcccctctttggcccctccccttagggttcttctttgagctctagccttataatcttgggctctagacctagtggacacctccttctggaaaagccataggcttttcaaatgctacatgtccaaactgacctctagacccatctcccagacccagtcttcctcccgggttcccaccctgtgcacacatctccactgcagagccaagcacttcttcctctcacctggactccaccatagcccatgttgcttcattggcctccaatactctgtacacatgacagccagaatgatccttcaagaaattcagcctggttgtgcaccccctttttagaaatgcaaatggcttcccattgctctaagggtgaagaccaacacttcaacctgatcctcccagcccacctggcccacctggcctgcattgtctggcaccctctgcacctcacctcaccgtcattccttattctctttcctcaagcctcattctccttcttcagctgtcaacaccatgttgtcctccctcccccaggcttctctgggcttttcctcttcctggaacagtggtcctccacatctccctactttactccaaatctgcttgcccctctgccatgtaggccaagggaatcacagccatccttgcacaggtcttagactctctggggacatcttcctggtgcttatcaagttgaaactttgcattcattagtaaaattaaatcaccacttgctttcacactgcatggtaatctctcttgtgtccccagtgtccagccattggcaggcacataacatgtgctcaggaaattttatttgaataaatgagtgaatgattcaatgaatggagcaagcctgagatagcctcatttcctttcccattggaggattgttctttcttctgtgaggacagaacctataccttgctgaaatattctggacagtgagaacccttctgctgagattgtcctttagctcctcacttggtgggatctcagagaagaactcttggagacagtttgaggacaccacaagcacacggttcagtcaataggaggctctgcacctgtgtgtgctgaattcaattgcaaggtttatgattcagtgtgaagaccagcttagcagatgggaaggtggtgaatcacaaaaatggcccatggtgttgctgtggtctttccctttcagcacatgatgtagtcttgctggctttgctcacgtgacaacacactttctatctccactgcagggatataggcttgacagcaataagtaacctactaatgattagcttgtttgcttgtaattaatggctgctaaggccaggcacatcaggggcaatgatcagtcctgattcattgatcaaactgtcccactgaccatggactccagaaggcagctgcacttggtcaccaatagttttcctcctacccaccctatccctggggaagttgatactaactaacaatagcttcttagcagattttttactgagcttggctttccaaaacaactggggtcccttttgagaaaagggaccaaagaaagttatttgcaatggaaataaatggaaaataaattttgacagcagccagcctaggacacttgacacagaatttggctatcacatttcagtggattgtggggctgtggagtaattgtgtgtgtatgtggtaactaaacctaaatttagggtttagaatatttggcaagttcttaagggtaggtggcattttcaccagctgtgtctgctgtttttcttgccctgaggtttactgacattccaaatggagttgcctcctttgctgtggataccagagtcagggcaactgtgaacaggaaaaaagctactggatctacatggccaggaggctcagctaagggtcctgaggtctaagcctgtgtggagttgctgtgataatagcccagcttcttgcaactgtggggccaggttgggtccgtgctgctggtttctggctttcttcttgggtcacactggaagtcaaaatcccagagtaccaaagagaactgagggacctaagaacaaattctgtgatgagcttgagtatccatgaaagagacttccaggaactgaggtctggctggtgtttaacggttagctggaaataaaaaaatccaaatagaatcacccagcaattccactttgagatacgtatccaaaagaatgtatatatccaaaagcagggtcttgaagagatatttgcacacctatgttaatgggagcattagtcacggtagctgagaggtggactcaaatgtccaccaaaagataaatggataaataaaatgtggtaagggttgagtatcccttttcccaaatacttaggaccagaagtattttgaattttggattttttcaaatttgggaatatttgcgtatgcataatgaggtatcttggagatggggcccaattctaaacataaaattcatttatgttttatatgcaccttatacacgtagcctaaaggttattttttgtaaatttttaataattttgagcctgaaacaaagttttgattgcattttgactgcgacctgtcacatgaggtcaggtgtgagattttctacttgtggcatcatgttgacacaaaaaattttagatttggaagcatttcagatttcagatttttggattaaggatgctcaacttgtatatctgtacaaggaatattactcagtcttaaaaaggaaggaaattctgatgtatgttacacaacggatgagccttgaagacattatgctaagtgaaataaaccggtcacaaaaaggcaaatgctatatgagtccacttgggtgaagtctctagagtagtcaaatgcatagagacagaaagtagagtaggattgtcagggtccggggggaggcaggaatggggagttattcaatgggttaagagtttcagtcttccaagatgaaaatgttctgcctagtggctgcgcaaacaacatgaatatactttagactactgagctgttcatttaaaaagggttatgatgaaaaattttgtgctgtgtacatttttaccacaattaaaacgaaaaaattaaaactaactttaaaaataggtgtgtattttttcaggagactgaaagatactcagtctcctcggttataagcaaacgtgcaaattagtgctaccctggacagcatttttcttggaccatagtggcagaggatcaaaaagctacataattaaatgtgttggcaatagcatgggactcaggcactcactctcatgcatggctggtgggtgtgaaattggtataagccctttggatagtattttatttctgtcaattttttttaaatgtgcagcacttttacccatcaatttcccttctaggaatttatcttctaaatattcttgtccagatacacaaagaagtgtgcataggatgatgctgtagcccagtttgccaacactggcagcagcctcgttgtctgtcatggggccctgggtaagggagtcattccttgacacccagtaagtgaatgaggcagctggactgatgagtccatgtggaaagatttccaagatatgttaagtgaaaattgcagtatacataccactgtatgtaattagctactatttgtgtaaaaacaaaggaggctgtatttatgcctaagtgcaccattctcataggaaaacacctgctagggcctcgagagactgagtatcctggttgtatctgggccaggagttgggcgactggggacttcattccttcttatccttttgaaggctactttttgaaagcatgtgttatttatttgtaacaaatacatgcatatgtaatatatctattcaaacatacatacacttttttagagttggccttgatgatgaaggtcccagtcatactggcctcacagctccttgaagggcctctgatccacagctcctaaggaccaaacaaccaagattcacacgctcccaaaacacacctgctccaaggatcttactcacattgctagaatctcaacagaaacaaagtgccccccatgggagaaagagatccccctctagacaacgggaacaattacccattgtctatcattctgttgtcctgaaaacctgactgccttccatttctggggttagcccaggtggtccattgagggccttggaggaggccatcagtgggcactgttacctgcaaggggtctggtataggtgggtgcagggtcagctgcagtgtgggggtgtgggaggtaagtgggctggagggtaggtggagggaatttcagctccatctcatggccctggctcaggttcactcaccagcatgcatgcccccaccacatccctaggcttagcaagtccttgctgacccagggaaggagagtctcccttctagtccatggtactaagtagggaaacagaatttataaagactagaaataagtattaccatagtaaattctgttcctaaattgtaagaacagaaaaactgatcactgtttgccaaggattaggagttaactaccagagaattagggggtgatggaactgtggtgtgtcttgatggtaacagtggttgaatgaagaaatgaaagcctttgccaaaactcctagaacagtacaccaaaagtggtgaattttattgaatgtatgttttaaaaaagtaaatgaaaatttccgaaagaaagtatctgcctgctggtgagataaatgaggaaaataactgttatcatgtgactagtgtcagctcaggtttgggggccatggccccacacccaacccacaagctcaacttcagggacaaaagtatgtggttctcatttatctcctgtctccatacacagctccatcaacagcactgacctccacttcatgagggttatttttgtctcctgttttatccttgtatgtctcgtcaacccaatggcttaattttagggactataagtatctaagaaaagaggtgatgaggtatgtctcatgttgtggctgaagtggaaggatgtggattccacttatcttctgccaggcacccagaccctgcagaatcaataaagacgtgctactgcataggaagcctgggaattaaatacatcagatactgctcccatgggcttggacacaactttggtcaagttctgtctttgccatggagccctgcttctctggagggcagttagaggtacagacattggggcccgtcaaacctgggattggattctggttccaggtccttgaacacagttatttaaatgccttaaacctcagcctgtttgtttataaagtggggataattactttataagagtttggaagatctgttaggtgaatgtggagtgtcagctgtacccttatgactcttctttagcgtctcccatagagctgagtgctcagaacacaggagatgccaaattgatgcctcttgaattgaattaaatgccctgtaatatgataaggaaggactcagaggctggagaccccatgcgttaggaatctttgtttccttccaagagcacaaagagacctctctgttttcttaccaccttcattctctttctttttcccttcatatttcattgttttcatatttaccattccattttcctccctgtaccttaactaaatctgattgccttttcctgtaccagatcagtgcttctgaataataataataacaacaatagcactatacagatttccatagcaaaatgccttttgcctgatttggtaggaaaccagggctcagaggagacaaatgacacatctgtggtccccaagctaatacatatttggtggacccaaagctctctgaagaactgaatcccagcttattgcacaataatatcagtactagatgatatcaagaaattccatcttgactcaatcacagccactacacctagtcagtcactgtgagctgaggtgaagaaaaaggtctgtatgccacgctaatatcccagtgaatttacagagcaagccatagctactccattctagaaatatttgctgatccccaagatactgatgccactttgaggtcatgaagctttattccaagccttcttaaaatgaggcttctttatgattagctgctgcttccattttattgtcaaaattcctacagagttttgttttgtttggtttgtcctgatgaaccaatatatgtgggttgttttcttcttcaatttgtggccaaattgaaagatgtgtcaatgaccatctctgcatgttgatgttaccacatcccaaataggcccttatggacctccttccccagaagattgatggggctggtcaagagagactttctcgtaccaaacaagaagagaattggcatgcgctgggtagcgcattttattgttactgactctggcattttccccccattgcagctataatcatgggacctcaggcagtgctcagtcccctcagcagtactaggcagaggccagagggcaggtgccttggagcagggacttggccctctcatcccagctctgcttgcctctgcgcacatcaggattgcacctcctcttgcctgacttaatacttcataacctggactgacacgttaggatgggaatcctttatactggaaaacaaaacaaacagggcagtgcttcattatagagcctcatgtgtgaggttctgttctccctcagaccaagatctaggaattgccttctagaaagaaatgagaatgagagcccagctccatccagcctaacaaccttctggagggataaaacatgctgggactctcgactctccattactgtcaccaccaggaaatgcttcagttggaaaattggccaaactacatttcaacctagttaacagtgggcacaagtacaggttgggcatcccttatctgaaatacgcaggaccagaagtgtttcagatttttttttattttgaaatatttgcatatacgtaatgagatatcttgtgggtggtacccaatctaaatacaaaatttaattatgttttatatacaccttctacacaggccctgagggtaattttatacaatttcttaataattttgcacatgaaacaaagttagtgtacactgaacaatcagcaagcaaaagtgtcactgtctcagcccaccaatgtggcattatgtcactgatccaaagtcagattttggagcagttgggatttgggattttcggattagggatgttcaacctgtagattatttaagttgtatttactgagatcagtcacagagcagaaacccgcatacgtcttctttgcttttttcctttaatgcactcaggaaaggaaagccacccttggaatttctggggaagtcacctagcctaattcaatctatacattcagaactcctacagcctataatttctcaagagaaaagggttttgtcccataataatatggagaattgctagactctcaatccctatcacagggattatctcaatccccttgtaggtatgattgactcattggctatatgaggtttttatattctcagtgtatgtgggttttcatgtcttagaatcctgagttaagatcacaggttttaatggcaagcatctcattttattgtgtgttattttattttaattaacattgcaggttaaagcagcacatgactcaaaagtataaacatcatagtaatatatttgaagtaggctttgtttatagttgatgaatcatttgttcttggttcacaatttacatttactaaatgcctgcaatttgataagtactattctaaacattttcatatttctctcttttatggatttgtttcccaatttactttttcaaatgagcccaagggcctttgggacattccagtatatgaccagccaggaactacaatttgggggcacagaggggctgatcaggggaattttaactgttgttgagagcttcctagtggccctgaggatctgtgggtcccgaattgtctttggaacatcaaagacaaattatatatgttcagaaaacagttcagagcactgagtgtacagtataccacgtggcctttttagttgatggcccatatattaacctatggtgggtgcctctccctctggaatgtgccgttcttcactgttctgaataatggagttgaatgttgccccattttctttctgaatccagcactagatttagaggctctgggtaggaggaagtagaaactgtctttgggagtgtggaaagtttgtgtccttggtgtatctggttggggggatcctgaattgctcacctgtttctgtgtttgtaaacttccaaatactcccctggatcccacagatcttcctccttactcattgatggccagattggccatcagaactgttgccagttcattcaaattgtccttttgatccaaggccacatgtcctcccatctttcactctagatggtaatgagatggaaaccaatcttgtgcccaggggtagcatctctccaatacacagcccatggcccctagggaattgaaaaaatggctcctggtttattttcccaaaacagaaactctctcaggctcgtgagaaatctggcagttgaaaaatgtctcctgccatatacttcatccacaaagccaagagagaggcagtcagcacccaagagtcccactggcctcctttgttaccgaatcccctgactttctggagagagggatgcccaggagtttcccaagttaccatgtgcatcattaaccacctaaaatagcggctttaggtgcagtggtatttgaactactgaaaaatcctgacctggatgtctgctaaatatagtaattatgactcagtaattgatacagttagagctattattaagattgggatgttagggtgaagattttgccaaagacactctagtgttaaaaaataaacaccattcctcaatttggtagttccacacctcagacccaccttcctgagggatgtgggatttcatgtgctcttggtacacacatacaaaatcctggagaactgcctagggggcaaatggggacttatatctcccatccttgctctttgccatcccttgaaggttttaaaaatatgcatctgtagcccttgcatggaatgaatggctggcttgcaggaaacaattctttctccctgctcctccctcatggcaatctgtgccactgccactttctaatctctcattgcttctctgtttcttctcagcgagcagaaagtaatttattcatattttaaaatacggaacattcacaaaactcaactttgccttttcctcttttcccatgcactaatcacccagttatggcaacaaccatttgaagcatgtgaacttgccctttcattccttggaggggaggggtcctcactgccatccttgcatttagatgccagggatagcagcaccaaccttctttccccaggtccctcacctgagctcgtagttgtccagagaggggaagggctgtgcacccctccctgtcctctgaatatgcttctcattccggttcctcctggtcactgtgtttcctgcacattgaatcctccttccttgttacctgtctagtctgtaactaacctcttcaaagatggttctttcgacatgcttggttccctagcaccaatctgtgttgtctgctgtgttcctgagttggttgaacagaagtgtcatctgtcttccatgccccttagcacaatgacctcagggcagaaatgaccaacccttgtcctcgatggacaaaggttgcctgagcttccagtcaccctggcttaggcctttccaggctctgtcaccccaggcactgagtggcgctgccatcacattctggcaccccccatacctcctctaccctcctgctcatgtgtcagacacccctgcccctcctctgttcccaatgaggatgggctccccagaagtgctttcaagaggaggacttgtttgcaaatcactaaggacatgctgggaaaggagtgggagaggaaagaggaagggaaggaaccaaattgagggtgtctccccagtcaaaacactgcccgggaaggcttcatcttaatcccacaggtactcagtgtgaattctccctccaggatgtcccagccctgggcaagggcgctgggcttgcaaacaccttcctccatcagtgattagttaagggacctgggcagggcagcagtgtcattattgcccatgctcttccagaagtgctcaagggcccccccttcacccctcttcaaagagaaggtgcatgtgctggctgttacaaactggaggcacaccgaagcggggtgcagatgaaaaccagtggtgtgggcagatacccaggttgttcactgtgcactagatccgaaagttatctaccttttgataggaaactttgcaagtatttcaaacagagctttctggccttgacaaggccatggatattcttctttactatactctaaagcaaggccagatgcttgctttagagtactcaggacaacattgtagttaaaagcctgggctctggagtccaagaaaacagggttttagatttgtctctgccacttatgagtcatgtggccttgggcagattattttcctttctgaatcaaatctccacatctgtgcaatggtgacaactccacttatctgccagtgtgttcgaaggaccatttgagacaacgcatctgtagcctggcaccagcgttcagcccaccacacctgctcagtccatgggagttcttacagtcattcatttttcccattcaagaagcagaggattccaggaagttaatactgtggtagaatcccactcactatggacctttagccttttactcctgaggccagggatccagtgctttagtttcctgcatctcatatttacatgttcaccatatccacatactccctggagaattattatttcctgtatattttccttaaactcactttcaaaaactgtattttttgaagctaattttattatatctgtttcataaataagtgtggatatttttataataatattaaaatgatcattatataactattaacatttacaaagtttgttctcgtatggcctgtcctcatctacacatccctggaagcacaccaagcaccttccaggcatcctgtgtgtacttctcataccttaagagctatccagccatagcgatgggatttcaacagccctagggatttagaagcagttcagagtatggtatttctaatctttccaataatgttttatatgtctcactgccgatatctgactctgggaatggaattatttctggatcctgaggttgcttgtgaggctgctgtgtagctctctgaattaaatggttggcctggcctcgttgccatggtgacaggaatcagtgcaagccgaccaggtgaccagctggatggggaagcatcacagatgtgggccatttctttgtcagttatctcaatgactgtcatttccatccccttgagttggtcacatgagcagtcaccatctcagatcttatctctgacatagccggtgggagggcctgaagaccttggaagttggtctaggatgcataccttggaagacacacacaattcagtgatgtatttttaaaaagagtaagaaagataagcaaaccgggtgaacactgtctatttatttactgatgaatgcaacacctgttatagagttggtactccaaaattttaattaaatgagtgaatgaataaaccaagtactaacactgtactatataataatcatatgtatgcttcttcaaccagcatttattgactattttctgcattcttaggaccaggctgaggataaaagggtagaatagcctgaaaatgtgaagcagtcatcagatgtcagggggtgggtaagaggagagaatctgggtgctttcttagggaaagagaatggatcataaaatgggatcactggagctggagggtaagaatcttagttggggggatcagttaggctaagggcaagtcagggaaacacttctcaagccaatggccagttcatccccttccctgagagaatggcttagccctccacactccagaaacactgcaatgaggcagactttctagggtcgtgctgcagatggtccactatgctgcttgcctctttggttcctcacaggcctggtttggagggaaatgctctctctcgggtgtcttgctggacactgtatctcttggctccaacttccttggcctagcttgccgcattccaagtcaaaatagctcatgctccttccgggcggctccccagggcctggggtgcatagatctgcatggagggggagagggtctgtgactggagatccttcttttgatgggtatctctctgtgaggctcagcctcggccaccaggccccatgtgcccagcagagatgctgcctgtgttatctgagtacttagaccctgggtttgcccatctatagtccatacccacccaaataagtcatgcctgtggaaaactttttagacagttttagtccttgtgatgaaggagagcaaaatctctctccagaattgaaaatgcttcagcagagaagtactcttgcagtaaactggctccatctagcagatctacaaaattagtggagggaagctttgcaaacacgaatctttagggcatctcaatgaggatgcttggttctgtccagactcattgccttccaagtaatgaaatcatctgggaaacaaacttattaaaatataaaacccttctagaatccttcttcaagcttcaaagggagatttgggggaaggaaatactaccccattttaatgattgcaaagatgtttggggtgggagtttgggggtgcacattgtttttggtgtctaattcaaatttggttatgtgctgtaggtcagtttccagggtgcacagcctggactagggtcttcctgagcctggaatttgggacagaaggagctagacccactcatccagctttgggctgcagtgacttagagggattaagaggcaaatcttgctctggccatcccgaaaaggctagaggactcacctctgatgcattttacaattcaaagggatgccccattcctttggagacttagaacaaaagccaactgaagaggttgtctcgggttgggtccccaagacagagattcttgtgcaagtcattcattgttggagagatctccagagaaaaggagtgagagaaacaggatcaggcaggaaaggaggcaacaaaggagtggtgttggctgcagaccagcctcaggtggatcccaggagaccatggagtgtgaatggcaccacagagctgtcctgccttgaggcaggagctggcctttgtaccctagtgtctaccacccctcttggagtgaggacttaatcttctaggcatttctgggtgaggttgcatgcactggccaagtgcaactctggagaacttactcttagcctttatcaggagctggatgcatcagccccagaaagggtttctgagcgggcaccaacagcatctacaagacatagtcatgtggttgtcctgcctgtactttgcattggactggatgtacaagttcttgtcacctttacaaggagacatcattcatctgtctatgagaactccctttcctttccagccctttccttctcagcttttagacatgttttgtaaaagtaggggaaggggtggatacataagtgaatgtagctggtcagacatgaacgcctcgctctgtagagcatcgccagctgtggatgtagccgctcagctattcatccaggcttgttaaaatattagagcataaaaaggctgatttcattcgttgtatggcagtacagcttccctcaggaaaggcaaggctggccaaaatgtgtgtggtccataccttttgggtggatgatatttgcaagacttgactccctcggctgtgcccaatcttgccctgaccattcacttcacttcttgccttttctctagaacttccctttctgttatttggaaatggtcacagaaaagtacaatcttttccattctgaaacccaacttgccattttcttccataccatgtggttctaatatccacatcctccacagcaccccagatttcaggctgggcatcctgttgtcacctgagtctgcgcctgcttccaacacaccaatacatagccacacagtggattctgtttggctctttggatctgagtttccggcaaaaacaagattttttttaaaaacaatgtgacagaagaacatagaaatgtctggaacgtgttcaagccagtgaaaacactgagaagacactctccctgccgcctctcagtgcagacgagtcagacatgcctctgggacaccccggctccctttggctggcacagggaatggaaactttggccacgggtggttgtttctgtggcttctgcacttctggcctcacccgcttctcactgatgatttcgcagagtaagcctagtctagcatcagtccatcctcaacaccagccagccggtctccatgcagcaaggcccgataggcatgctggagtctcaacaggaaatgtgcttttccactgagcaaaaacagacactcaggagctgatgggctgtggagtgatgtgcatggttcactcaggaccctgtcacattaaaggagcatatgaagccatatccccacatagctcagggatgtggggaacaagttgctgtccatcgcccaccctccagcctgcactcctgtggttggattcccaatctctgtagcaatttattgcaggattcctttggaatgatcaagagaatgtttgtggaagaagcagcatttgtgtggctcctgagttagcctgggttgccagaacctgagcctggcatgagcattcccgtgaaagccatgttggacatgcttcttggaaaaactggtcagagagcacatagtgtgatcaggaaaaggtaggaggtcaagaagggcacggtgtcaagcagagtcccacagagaggaacttcagcacaaccgagccctgggtgctggctcctgagtgtagaagcactctgggagctggagttagcaaaatggtaaagggctttccagggaggaggacagaaccctgactgccagcttcagttccattatagcaactttcagaggagtttgtgggagcaataacagcaccaggcctgttcttccccagtgtctaaacttctttctgttgtaagctgagctcttttgcaagccccagtatcaactccttctgccttctccttgtgagttccaacacactaagtagacattagggtaccagccatttaccccatggggtaccagcgatttgccccatggccgtaaaatgtgcacatgataaaaaagggccctggggcatagaaagagtccctacaaaaggtgccaacatgctttccatcaggatgtatctcaggcaacaggagaatctgagtcagctcccagctcattcttagcccatgacaaatgttgagacacaagtagacatttccggcactcaaataaggcaagaactccaaaccagtccctttttgggtagaaggggctaggaccgtttcatctgaataggaagctctagttggagaaagatacttaccgcaaggcctgcagtgaggagcagaatcccagacgctatgtcctccggggtcatgtttctccagcccaaggcttagtaaaaggctaattaggaagttggccaattttagtctcgggtcccattttgggctctaatgtactgtgaaatgtaatgcaattccacatgttttgcagatgcttggtgcagtcatttctttgggaaaaaacaaggttagggtttgcacattttttcccctttgagcctggggagaaacgtgaactaaaccacgtctaatgttgatcctgaagaggctgctgtggtgtagaaggaaggacacttgcctcagaagatcaagtggatcttcttactttgtgaactgagcctcagtttcccactctgtgaagcacagagctctcgagttctcatgaggatcaggaaagagcatgcaatgggaacaatgatattaacatattaagagttgctactgtttctgctggagaacttggctgtttgttcaaggagaaatgctttaaagcagaggtccccattccccagaccatggaccagtaccaatccctggcctgttaggaactgggccacatagcaggaggggagtggtggatgagcaagtaaagcttcatccgtatttacagccactccccacggctcacgttaatacctgagctccacctcctgtcagatcagtggtggcattagattctcgtaggagcatgaaccttgttgtgaactgcacatgcgagggatctaggttgcacactcctcatgaaattctaatgcctgatgatctgtcactgtctctcatcacccccagatgggactggtctagttgcaggaaaaccagctcagggctcccactgattctacatggaggtgagttgtataattatttcattatatattacaaagtaataataatagaaataaagtacacaataaatgtaaatacttgaatcatccccaaaccacccttccccaccagtccatggaaaaattgtcttccacaaaactggtccctatgccaaaaaggttggggactgcagcattaaagagccacaacctcattcaaactctggatggctgtgcccctcccccacccccacaccttgtctctacttccctgtccacctggactgcctcctgcagtccttctctagggctccactcaagcctgatttgccctatgcagcctcactcactgtgctggctcatgctgacaccttccttcctgacctcacttcccactcactgtctgatccatattaatagatatcaattgttatcaatatggttatagctatggttatcagttcaggtgagataaatagtggcagattgcatcttcccaaaagaccacagcaagaactccaggacaacatactcttccagaatcttgtcctcccccaccaaaaatgaagagatagggtccacttcacctccctttaagactggttaaatctttgtaactgccatgaccagcagaagcagcggaaatgttttgcgtgacttcctatgccagatcataaaaggctgtatgatttcctcctggcactctcttggcgtgtgcacgtgcagctctgagccactatttgagaagtctccaagctgagaagaccacatggcaagaccacagacttggagaggccagggagccccagctgttccagctcccaggtgtttcagttcccctagcccagaggccagacaggcagtgagtgttggagccttcacatttccaggtccagccaccatatgattgcaattgtgtgagcagccaagtaaagaccacctacctgaggccggtcaacgcctaaaaatgtgagacataacaataaaatgttacagttgtcttaagccactatgtttgggatggttattatgcagatacatatacatatgtactatcttagttctggcagctttaagaaaataccatactgggtgggtttataaacacaggaatttatttcacacagttctggaagctagaagtctgagaactgggtgccagcatggttaagttctggcaagagccttcttctgggtgacggacctctgacttctccttgtattctcacgtgacagagagcagagaggggaaacaaactctctcatgactcttctagagacaaggtctctctccatcacccaggctggagtgcagtggttctatcctcccaccttagcctgctgagtagctgagaatacagttgcataccactatgccaagctaatttttcatgacttttataaggatactaatcttatttgtgagggctccaccctcatgacctaattacctcccaaagaccccatcgcactggggattaggatttcaacatatgaatttggggagtagggtattcagtccattacacacatacacctagatacttgcgtatgcatatgtttgtacatatgcacacacacatacatgcatacctatatttacatacatgtacacacatggatgctacatacatacatacatgtacacacatggattatacatacatacatgtttagggatgtagcctgatttcttcaatcatcctccagtttgtgcatttgtgtgtgtgtgtgtgctggaagttagcttcccagctgggctgtaaactcctgacatcaagactgtgctgaatactccctgttatcctccgccagctgaagaacgacatggtggatgtagcgactctgccctgaacccttgagttatattgatgaggaaatgtgtggtgcacacctgtgtccctgaaaagctcattacatgatgcaagtgggatcagagtcactttggtctttgaatctttctcaaggaacctgtatccttggaaagaaccatttacctgaaattgttgagaaaaagccactcgatttgcttctgtgtcgtagactcagtggaaggaaatgccactctctccagtcccccaactgtggatactcggccgccacctcggaagctattaggcagggtctcctttccttgttcaggatccccatgggatttgctgcttctatcttcagattcaaaagcagctcttttgcttctctcctcatcttagtgttacctaggagatcagagatttttatgagttaggattgacagtctgatcatatttatgtgagctaggcaagaaaagttaaatattggagtctctcattgaatacaatattatttggataaaaaattgtctcaaacattgaaagggtcattttctaaaagaatttattttaataaattttcctccataaatctatatgaaatgccctgaaattcaaagttatataatatatgagaaaacatcaaaggaagcaatgatattaaattcctttccatccttgaaaattctgctaagttattttaccccacccactgcatgaactcaaacatcgttacaagaactcaaacagcccagtgaggtgcaacacagcttcttcaagtacatggtaaaccactcctcgtctgggaaggctggagaggaggtattagtatctttgatcagcctttgactcaagtgggcctgaaatttgtcctagctcatgactgtaaatgtatacatttgcatgaggcctctgtgacatcatgaccaaggttattacatcagagtggatgttgctaccactacctcttgcattattttgtcttgtaataattgtattactttatggatctcttttaatctgttttcaactccagccaaccctgcaatgatacataagtacatggaaagacaaagatgacaatctttgtgccaatgacacaaactcataggttctgaggaggagcaagaagtaattgacttataatgggtgatatgatggcattctaacataagaatgaagtgaaactttttcctcctacttcctgtccactttccctccttacttggaacataaattatggtatttatcattttcatcttaactaactcaacaactaagccaaattttcactttcttccataaaaaaagtaaatgttaatactgaggtactttatgtaatggccggacttggtcaaaagttttatttttctgcccacttttctttcctcttcataaagcttcacaagtttctctagactcgaaaagcatttattaaacacctaccttgctgttaccatgaatttcaatttggcgacttcacatgggacatcaaaatctgacacttgcaggaaacatctaagagatcccacagattctaaaggaaagtagaacacaattttaccttcttggctgtaactggtttccaatatcattttgcctctgaacacatgttcttgcctctgagccttggggcatcacctgtcagagacattagaactgccacagatgcttgtttgggatgacttgaccttgaaatatttatagttgagagctttggaaggctgcagtgtctcttcctgtaatctcccactgttctgattgctctttctgtctgatttttggtttatccacgtaagttgacatgcaattagctcacctcccaggctttccatcctagcttgtcagcccatcccaacaacctttactttccctaggctgttatttaccaccaggccacaccgtgactccaggcagcataagttccatggaggacttaatgtggctaagggcaagtttggggaatctttaatgtgaatttggtttgcagtcgcttatgaagtagaatatattccagaggaaagtgaagaaaacaagcagagactggaggggatatgaacctcaaaagaaaactagactggcagagagccatagcagttagcttttctcctctgaaacctccccaaggtgtgtagcatatgggggatagagctcaggcagaaagcagcagtcttactcggttgaggcatcagagattggagcttgggtcccagagcagctgaaaattgggggaaatctcagaaagaaaggagtcaaagagggagagccctataatagacatataaatttccctcaggtccgtgactgactgctgaacctcacatgcttggggatgactccacgcggcccagggaaaacaacagctgaaaggctgaaagcggatatgtcagctgctgcctggcactggggagacaaactgagaagtgcaagcctctaaagttaaaggggcttgataaacagttcagatgctccactgaaagcctatagggaccacatctcaggactaagggcacacttaaaacaggcctaaaattaccacaaatgatgaccctccagtaattcaatcaaagctgaaaacctaaaaccacctctggctttgtggcttgtaattacaatcctctgataattcaacttcctattagaacaaaactcaacactgttcagaggaagatgacagaatccagaatctcctgagccaccatccatgaagtcaaatatataataaaaaaaattaatagaagaccgggtgcagtggcttatgcttgtaatctcagcactttgggaggccaaggtgggaggatagcttgaggccaggagtttgagaccagcttaggtgacatagcaagaccctgtctctaccaaaaaaaaaaaaaaaaaaaaaaatagctgggcatgttgatgcacacctgttgggaggctaaggtgggaggattgcttaagcccaggagttggaggctgcagtgagccatgatagtgttactgcgctccagccctggcaacagagtgagaccttgtctcagaaaaaaaaaaaaaaaaaatactagatacacatcaagtagattctaaattctcttgctttgatcttgcttgctccaaactctgacaggtcttctgccatctacaaggcagcacagtgcccttcctaagatacctctcatgtcatcagtttctgttcttaatctgtaacccaaaatcctagctggacaccaaagcacattgttgaagcaaaaggcacttagtatgtttcattcagagctatagtgtgccatcaccagagccctgtgacagttcaaggaaatggagaaaagtgaacaaatgaattacatttttggtttgaattaattatgctcttttcttaatttctgttcatattcagaggcaaatgttgtccaagagatggagacttgatatttggaatctaaactttggatgcacaaacttagtgatctaacaaaaaataatcaagttctaatctacccttaaaagagtttcaggagtaatttgcagattctttagtgctttgacctaaaattataggtaaatggtcaaaaaatattgaatgtatggtaacataaaaggaaaaatgatttcctgcagtcaacatctgcattttccccttaaggagggggccagaggtggccaggaccaaaactgagaagtaagcacagctcttattttttccaactgagctaatcaatattttttgtctgcttatttatgtcttcctacaacagctacgcatattcttagatatttatttcattatcataaactagaaatcaagctaaagattaaagacgtctcaataaattccctgaagataccaaataccttcaagcagatggattagtaataactctcccccttttaaatggattatattctaaaataggtgcagatcaaacaaaatgatatcaggaatcactattaccaggaccaaggagtgccagttattctttcattttaggacttggttagcaaagcttcagtatagggaaataaggagcgcacatgtccctgttcctattcccctaaccatggtagacattgctaatagatggagatgctctaccacactgagccccatccaagactcagcctatcagtcaatcattagcagtcaagcaatgaacatgaatgagactaattttctatccttaaaattggcagtcgtggaataacaacatcaggaggaaagaaaaagggcagtttttaagaggggaagcagagggaaacttttgtgcttttcatgaaattctgttattatcctcccatctatagaccaatagaaccataaaggttacttccacctctggaatttaatgagttaacattaaaaaatgtcattgattttgaaacctccagccatttagcatgcacacttcaccttctataaaataaatatttaaagtttaaaaactttccatgtagattcctgtagggaattactacattccaaaagcactatttcaagtgcattttttttctagaaaagtttttcatgcaatctcatcctttctgagggcattgaacaggaatgggcattccttgtaatcaccatgggttcccttgaggaactatttagtgggttcctgtgtacatcagcctattggtctggatcaatagcagacataagaacatgagagatgcagcacttgggtcagaccctaggtcatccattcaaacattctgtctctgatgttggcaccaagggacactttgagaaacaaaggagtccaagaagagtatcaagttctgcacaccacagggaatttaccataaatatgtcactttctttaatgagaattcattagtgacacagccttgataatcacatgtgagcaacaaatgcatgccgtaggctcttgcccttgcaaacagacctcctatctgctgccatgtttgtggcctgggaaaactacattattcatgagattgctgtattttctacagtagctgctggctcaaagacatgagcagcactgatgccatggtttttattattgataaagaaatatgtttctagtttgtcaaattacatttcagtgctctgctaggccaatagtctatgtaactaatgattggggttctttagttccaaagaatgtctgttctcttccaggagaaaagtttgtgggctgattgtttaaaatcttctgccaatacagacatgagaaaaagagctcttaagtgggaaccaaggggcttctcatgatgttggatcaacttcagcatcatgaacaaggagcaaaggcagtttctcaatctgcattcaggagtgaggtagttccataatgctatctagattgcaaatccaccgcaaattgtccatacagactattgccatgatttaggggaaaattcatccaaatgtgtttaagttcttttctggaaaaacaaatctttgttgaaatagagagagggaaaagtgcaaaattcctaactctccttttctaaatatgggttttccagaagtagtcccagaaacaaactcaagtacaagttgtttgtttctgagatgatcccaaatatgggagctgggaagtgagacaacgagacaatgacagataggcaaccaatcataggcatgttaccaccgtgagcaaccagagcttagttgtgctgggaacccttaacagtgtagaacacacctcagcgttatctcatccaggtaatgagggagctggggtacttatacacccacctttcatcagactttggttgacagtttctcttgagagaaagagtggtattaattctccagcatatccagcctgcagtgcctgggcaggggaacctttctcagctctggagaaagccttcagggaaagagatgaaggtgcttagtacaaaagacatagggccccaggactgtgggcctggtattgatgtcttgggaaactcccctatccatatttctccctctccattatttaataaattagagacaaacagagctatcatttgataggtccttgcccaattttaggtattgcatatttcataagcatcatcatcaatcctcataataaccacataaatgggtattgttttcattctcccattttgcacattaacaattaagactcaaagatgttaaagaattttcccaaagccacagaacttatgagtggtaaaggacggattcaaatccaggccctcaggctcttgtaaaatgctggttgcctgtggtaagcaaatgtcaccacataagcatttggctgatccaagttttcttagcaaatttgattggcaataccattttgattgatagtttaatgatccctctaggccatctgttcccatgacttgtggttgcatcttccttcacagagatgcttctcatgaccttgttttcattcacacatcaatccatttgaatctgaactttgtttctggtttttgaagggaaggacttatgcccttaaaaaaacaagaaaaaagggggtaatttgttctttctaggacagtggaatcaacatattagaaagttggaccctagtttgatctcagctcttccactaacgtctatgtgaacttggactggttacttgccctctttgggcctcagcttacccatctgtaaattgggataatgcttcctatcatatagaagcaatgaaaaagtgataaatatattttcaatacttgataaaggttatttccattcttaaattcagaatacttaaggtattgggatgatttcaaagagagtccccttgctcccaagctaacctcaactgttaactcctcagtgataagggctgtgtacctttaactagtattgagtatggtatccagcagatggtaagtgctgaaagtaagcagtggtgttttgacacagtattgatttaataaattttccaatgttattaagatatgatctttagaacgagacaaaaattcaaaagatgatctaagaacagactggttccctggaacacccagcacctcctgttgccagatgccttctcccatgcctgcctgaggtttacttgacctcgttgaatgtaagcatgcattgaaatgtctctaaaacatttccaaagactaaatatttagaaaattaagttatgcatttatgtactttcacacagattcttttgtggataattttgttcaggggcctttatttatgacaaatgtgttaattgcctcaaccaacactattaagtgatttgtgtgccaggtattttgctagacaccagggctacagagaagaatcaatatcctacaaccttaacctccctcccccagtctactggagaagagagaaaacaaccaaaaattgctgcaaggcaaacaacgtgcaaaaggctgtagggatgccaaggagcaaggaccatatgcatttctcacaaggagctaggatatgctgggtagcaaacagcccccgaagatcagtggctacaaaatacaataatgttatttttactcatgctacacgtacaaaatgcatgtattggggttggggattctggtatcagtcactcagggatccaggctgatgggagatgcacattgcatcctgatgtacctttcaagaaatgctgagacaagaaaatgcaaaatggtgagccaggcactggtttgaaagccacatgcaatccacatcattttgctcacatttcactaatcaaagcaagctgcatggccttacctaactttgaaagggatgtagaaatactcctcctaggtctctggaacaatgagaaatggggtatttgtgaacagccctcattgccaccagagttgggatctagtagttgggagtttgactgagctgtccctcccaacaccatttctcagccaataattctgtcttgtgtttatacaaaaccacttcctgagagaaaggccctctgcattcagtcacacttgatatttgttgtcctctttcatgtatcccagcctggtgggtgctgatgacaaagagagaaatgacagggctcctgtcctcagggagctgagctcatggtgccactgagtccacggtacacatggacaagaaaatgcctacagtgtggttggaaaataatttgatgagcactgggacaatgcaactgggccacagaaagagaggcagggaaggctttgtgagaagcggaggaggtaccgcacccggaagacaaagtttttacagtgccccaggaaaagtgggagcaacaggctttactaagacagatgaaagcacgtgaaacagaagcttgaagccactcatcactgcagggggaagctgggtagcatccagactgccatccttcggtgcaattcctgagagaccaatccctcaagttgcatgggtattttgtcatgagaaggtcactgggatggcagactggtattctgatggctgcagcagcccatgttccttttgctcagacatgttaagggagccaggctttttaggatgtgttgatcttcattttggcctgctccatttgatcaatatgtgatgagtatgtctaaagatggcatgaatgttcctgctgcattttttttcaagcaaaggagaaaagactctacctctgtgaacctccgtttagactcatcaaactcgggtctcatgaaagcagccaggagggagaagcaaggaagctgattgctgttgccttggtaaggggaatccactccactcaggtccctgtggtttccatgggaacagcaccgcttgcttctgcaggcccccagggctggcgggatgcactgaaaggaaaattgggggatgaaagagaggagcagaaagagactttgaggaccttgaaggtatttggggaatgactctcagctggatgaggctgctccgttctccctgcataggtagctgctgttaacaggccatgtgggccatgtggccccaacaggctgagtaccagaagcacctgcctagaggcacatgcatttatgcagctctcatggactaatcaccatccaggtaaacagatgccaatgcaagacaggaaggaactggcaatatgtggatttcaacatcaagaccagagatgaatgtgtcctctgcccacaccaggccagcatgtcattgttgttataatttagaataatgatatgtgaccccaggaagcatggcggtaggtatttcacattcactatctacactcttcataacaaccctgcagggatgacatcaacacacccatctacagatgaaggaaatgaggcccggtgtggcacagaaggagatctggacccgagcctgattctccactgtgggatcttattcaaaatctaactgatcacccaaggaaaatgttagttcccaaatacagcaagcatcctagctcaagccttaaaaaatgcgctgagtacttttggatttggcgctaggatgcacacctggagagggtgacatcagcaccagccatcagctctgggaggcgctagaggccccacattgtcttacctcttgttctagaagtgaaccaactgaggccaagaagcacttggcagagccttccagtccagtgcaccacactgtccgcatacactcttttcttggacagctgcagctattcagaaaatcgcatgccccacacacacctgcaaggcaccagagtgtgtcgccagttgaagagctgttgcagtctccaggaggaaagcacagctgctgttgcagctcttttcttgaaccactgggtcaactgggcagagtggatttaccccatccatgcctaaggtctgttctcagagttcttcatcccactgagacttatcaggcatctgctgtgtgcactgcagtgtactgtgtttggaccagaggcaatgggaaggaggatcctcagaggccacttttcaaatggccaaaaggcaaattgagtcccagagagatgaaatgacaggtggccaaagccacactttggaaatgttggcattgagccccacatttccagattcccaattgaggacacttttcttgactccaggctgaccccttccttaggaagattaaacactgtgataccaaattgctttagaaccacagcaaggcaacgagtgaaataacaatgttattagtaggctgtgtatatagcacgcacgtaggagctgacaaagatcaatgacaatccttatggcctccctaaacgaagctgctgccccagtgggtctctaagataggattcttcctgatttacattctgtgctgcagggtcatctggcaacaaatgccctttgcaaatgaatcaaagaagcttctaacatggtggaacaggatatgtaatataagaacatgttacaaccctaagtcttaacattggggtcctaccatgctagattcagaatgcaagtcttaataacagtttatcctgatgttatgcttgtgcagagggactcccttctgccacctccaccccatgccccactgctgtgtgctgaagctaattatgtgtgtataagttatggtctctcctttcctgcaataagataccttgcgtctcctcttcagttcttatgcaaaggaggcttcggagatgctgtgaactgaatgtttgttcccacttcccagattcatatgttgaagccctaacccccaaaatgatggtatttggagatgggacctttgggaggtaattagggtcacataaaggtgtaagagtgggaccccaatcatgagattaatgtccaaataagaggaggaagagaccagagtttactcatactctgatatgtagatactgtaagaaggtggcctcagccagccagaagacagccctcatcagaacccaaccatgctggcacctttatctcagacttccagcctccagagctatgagagataaatgtctgttggttaagctcccaagtctacggtattctgttgtatcaggctagggcagacatggggcattcctacacccagacatgcggatggtttcttgatatatcacctgtgactctttctagggccttctctggccccagaagcatgcttggcttggccagtgcagggctgagcagaagtgttgaagggtcagtgcctttgggacagccctaaacagtgacaggcaggcgtcagtggacggagccccccaccctgctgctgaccctgcagtagacaactctgagacctgctttcctctgtctcccagcaagcttgagacactgtgccagccccttcccctccctgcctcatctctccaccctgctcccgatgcttcctgggatcacctcccaaacaaacagctgtcattcaaatctttctctcagggtctgctcttgagggccccagcctaaggcatgggcatttggaacctatgagggaagactcacctctcacagggtaggagaagagggcttagctcaatttttttttttttttttgagatggagtctcgctctgtcacccaggctggagtacagtggcgtgatctccgctcactgcaagctccgcctctcaggttcacgccattctcctgcctcagcctcccaggtagctgggactacaggcgcccgccaccacgcccggctaattttttgtatttttagtagagacagggtttcaccgtgttagccaggatggtctcaatctcctgaccttgtgatccgcccacatcggcctcccaaagtgctgggattacaggcgtgagccaccgcgcccggcctgggcttagctcaatttttagatgaaatctctccctgtgacttttttttcaaatgataatgcatatctaaaagggaaaataaaatatatgtagtattctttgcaagctgtgcatgagtcctttgaaaccatttttccaattttgttattttcctgatacgtgttttctgagaggagctgtaatgaaaaagtggtcagagtgggtggatatcaggtgaagtttgctaggtgagtatttaacctggtcattctttccacattgctattggccatcaaataagactctttgtttttcttgaagaacagtggttcaaaaccgttagactgtcctctgccttgcccaccctgaccctggagctcccacattctacccacattcaactcggtgaggaggcccacagtgctggccgctccattcacaagctgtgctgctgactgtgccagattggaggctctcattgccccatggagaattttcacacacttcctcatggccagctgtgactgctgacaagaggagacagttttgatagaggagctcccagctgggcatggatcagagagcaggccctggagagcagaccaagatcaggtcactggtaagctgcccactccctgaagggaggaaagggagggttgctgagcctccaaggaaggaggaccctgacgaagctcctgtggtttctctttggctcacccctgcccggccaggactttgggcagcttctgggtggactgtcccgagccagcatggggccctttgggtcctgctccatccagggctcagcctccagtgtgtcttccccaggggtcccagctggggccaccatgtgggctggcatggagacccctgacaagaaacctcctccaccagagaaccaggcccagtgggatacacatatctgcagttgcttcattcagccagttgctgttcatgttgtggagaattgaaactcagaatgcctggattcagaacccaagcctgtcacttactgacatggtgtccttggtggaacagatgtgctccctggccctcagtggcctcatgcacggggcagcagtgaggcaagagaatagagctgggctggggagaacccagtgcagacgtggatgatgctcatggggtgactttcactcctttcctgtgctccctcggtcccttgttattgatcacggaggaagcttgtggggcggaaagtaaagagctaactggatgccacatacctgtacccactgtacccctcgttgatgattggggacctcaaataagaggtttccacacgattcctttgcttggcactgccccagggcatatgactggcttgtttcccatgggtgatggctgttgtgattgatacattaactcagcatcccatctctagcttccagctctgagactaggagaacaataggagaggtgacctttcaaccctaggactggccagtgccaaaacaccctgtggcagctacactgaaaaatgcaaagaaaaaaaaaagcctattgcttctcctccaggagagtggcagctgaatgtaaatcaggtcaaatcctcttttggaggaggtcacagaaggaagaagtcagagggcagaatggaattgcagatccatgcagtaggggggtggcatgtgtgaggggcgtccccagccctgggtttgctgggtgtgcagcccttctcccactttccagccatggagcccaagcatgttgccccatctgtcttccccttgggttcctcatctacagaactggaataataatctgtttgtgaggataagatgggatcacaggggcaaagtgcaaggtacagtgcttgccaggagcaggtgctcaataaatgctcactgttgtcatccctctgcccctcacattaatttccagatcgtggcttcattttggtccccaagggaaactcctccaggcttctcccagtttattcattgttcagaggggctctgtgcagcctgtttagagcagcttcagcttagaaaaatcctcccataatcatgatgttcctgtcttttcttgtctccttttttatgtttaaaggaccatacaaaactagagattgtgattggctagacacacaggtgggtcttgctttttttttagaaaaaaaaaaaaagcctttttgagatattattgacgtataaaaattgtatatgcttaaggtatacaacttgatcttttgatatacagatacattgtgaaatgttaaccacatttcagttcattaacgtatccattacctctacatagttatcatttatgtgtgtgtgtttgtgtgtgtgtgtagtgagaagatttagatccatcctcttcgcaagtttcaagtatataatgtagtatttttaactgtcccccacttgctgtactttggaaggtgagccttgctttatgtactagacgtaccctttggcccaaacacttcgtgtggctccaacccaatacctgcacaatgccttaagccaatgctgccttggatgcagagagcagagccttttcaagcagtgaccgatggcttgtgtcttgcacaaatcctccgggcaagccaggggtccccagcagaactgggcctggatgtctcagaggtcatccactcactccttagcagcactgtctttgtctcttctccccttcctggctgcactgcctccctcatgcacagtgcatcctggagtcatctcccaagtaaaccacatagctccacatccttgtcggagggtctgcttttagaggaatccaaaataagacaggtggcaagcaggtatcatctagcatatcctccccatcaaatggtggtggtttctctaagaacttgctagagaaagacttggagacatcatcaagctcagagggaaagacttctttcagcagctggtgatgtctgcccatgtggggctgtgggtgggggtggtgtgtgctgcttcctgccgcgcctggtgggcacatcctccagcaaaggagccgtggattcctatcggagggaccacaggaggcttcataaaggagaggagatgtgagaacctggcccagaaggttgattggattttatgagaggaagggacaggaggcctggttagtggtggaggaccttcttgggaccgtcagttcacagactccagctttcatctcaaggcagaaaggttttggaacattgagaaggcatgaacatccctgtggttggcattctggtccagccacaaatggaggtcaacttagaaaggggagcagagggagggagcagggagggggttgttctaatagcacacgaggcccacaccctaagccaggtcaggcaaagtggaaaaggagcaaaatgaagacccacttagagcaggggcttcaaatctgtctgagccacagacccttttggtgatccagtgaagcctacagcccccgctcagaaaagcagttttcaatgcatgcatgcagcaaagtacataaggttacacatggaaactgactgtgtggaaatgaagctgtcaaagtattagaaaacaaatttgcaatatagtagttcacgtgcttcctcattaacactttaagtcacaggtggtgacctaacaaccaccataagattgaagcagtgggtgagagctgcacaagtatgatggtatgacgtgttatgaaaatatctgtggggccgagccccaggttctgctaacgctactgtggttggttgcccacgttcttatctgaaggaaacactaaattctggttagttttgtgaacttaaagattcaggatctttttttcatccaagttcatggaccccatgttaaaaccaagactcccagacctacagcactgaaaatgtggtcacctgtgctgagacggttttctttctctgttctttagccctgcatgaattccccaatgacatcttcacaaacgaggatagaagacaaggtgcggtggtcctccatgtgctctgtgtaagtacccctctgtgcctctgcctggagggtccataggctaggcctaggggtgtggggtgtggcacctgaggtgcccccagtagattctctctgccctcctgttcccacgctgcctggtgggggtccttcgagctctgtagggggccatcaccaaatggagatgaaagaccacagctttcgaaggtggagccatctgttatgcactttcccttcatgttagtgcccagagtgtggactctaaagtcaaacagccccactctccatgacttaaccctactctctgctcaaacaccaccctcttggggagccctttcctaactggcctttctgaaatgccgccatatttcctcttaccctgctttgttttcctccatgctatctgccattgcatagttatttgcttttcaacttttcaccctcactcacacgtaagccccatgagaacagggacttggttttgtacacggcttcattcccagaccctttcttggcatgtggtagggacagaacatttgctcactgagtggattatatgtaatggcaactagcaccatgtctgacacatagaagatgaacaagaaaagcttgttctgttcccatctggcctcttactttccaccactgcccagcatcttctgccacagagccagtggctctaaagtctgtggtcctcttgtccccatttggagggtttgggggagggcatacatgtgacgatgtctaaggagtggacagctgtccaacaagaaatctctgagccaaattctcgactaggtacattactgcttccccatctctgtggcattccctcccccttaattccattctagttatttatcgctgtgaagcgagctccccacattcagtggcatgcctggtcaccatgttgttttgttcttgggttgtttgtgttgagtgctcagaaggagcacagtgggaatgctgctccacggaatccagggcctcagatggaccgactccgatggctgtggctagaccagtggtcctaaagggtttctctctcccatgcctggtatgtggggtgggatggctgaagggctggctcagctatggctactgagaagagcacctacagtgacctctacagcatggcagcctcaggcagtcagacttccacgtggcagcccagagagctcagaaagggagggtgacttagccttgaagtcccacggtgtcatttccaccattacagtcacagcccactgtgattcaacggaggggtcagagaccttgctttcaacccacagctggagcaggtcagcaggcacagcctgggctgtggagtcagagaagacatgggcttgaagcccacttctgctggccttgctttatgtgtcacttctgggaggacacttgacctcttacgacccacaggccaccttgatcttgactctgggtaaaatcaatcaactcttcaactggtctcccactcccaaaaaagggagcatgaaaagtctcttttctacaaggacattctctaaaaataccaaatgagtaaggagagcctttgcaaccccccagccctccctgcctttcagggaagttgtgtgcactgagccattaatatggatggcaccttcggcaccaaggaggctaccctgtcgcaaggctgaggagctccaggcactgagttggatccggaattccctggcagccgttagcatcctgatgctttgacatctgagatatgagatttccactctggacccaaacactgcgtgctttcatcctcctgaagagatgttgtcgcctgcagctgcatggtcctttctccccacctccatctcccctctggactcactgagtcatcagctggaggtggagggggttcatttttcttgctcttcatgagcccaggatacccaggaaggtttctggtgtctgtggtagtgcatttccaggctggcataaaggcaacatggacacaaatgcatactatcctccttaaacacttccctaagaatgggcatgagtctacatgttagcacttcgtaatcactggaatccgatgccactgttagcccctgccctgggccctacactttagaatccatagggcaaggagttcatggaccaaggccagtgcccaccccttcaagattatgttccaagcacacagaagcccagaattctccacccaaatagccatgagcctgctgccaaggcccttgcaggttttctccctggctcctcttcttgtagggaagagacccaagtggggcaagcttcaacacacaacatacatgcctgtgtccaacgtgaggccaggtgggcagagcagcagggcagagacaaatgttcgggtggacctgctggtgccatccccaaggcccaagatcaaatcttgttatcctacccactagaatataagcccctaccaccagaatgtaagccccaataaagaagccccttcgtactgtgtccagccattgaatgcctggagttggacagtcactttttgttcagggcaggagtaaattattctttctatccccttcaccttccatgttgtacagcacatttaggatgctcagaaatttttaaacaaacatcattggatgtaagaactgctggaagggtaacatctggcatttgactggccagcaggaaacagatgaatgcatgggtcaaagctgcaagaagcaaaatacagacttcctgcacttggacatctagaaagcactttttgagcccctgcagagtagtgctgggctgagtccttctagatgctcaggacatggcttcactctgaaggaacctgctgtcttgtgaagagaaccacttatggtcagcacctgccatgcaccaaatgctgacgagggtctatacagcgtgctgtgctgtgggagcttagaggaggcaactcagtgtcaggaaggccaggtggtgctgttcttgaagagtgcaggcagattccaaagaagcatggagaaaagggactccacacaggaatgggaagcctcatgatcagagacacagagaggtgagagtcagggagtctagagagagcagaaaccaaaggtgttggtgttggagagtgagagaatatgagcgtggagagactgacaggacctcacatgggaggcaccacaggtgatttagctgctgcgttggagtggtgagagattcctgacctcaccgtccctccttgcctagggtttgtgctgcattagctcaggcttcgcccgaagtgacccagagtcatctgccctacagtcagttgagaagagcccaggcaggacatagaaaaaggctcagggccatttgggcaggtgatcccagagtcccaagggccctagggaatatccagaagggaatgtggaggacagaacgaccccaggaggctgtctctaggctcctgaagatctgggactgccttatccaggcaggggagtgatggtcttctgctggagggtcccagaggggtgtcctgccacctcaggcttcccccaagagagggccatggggctgtcttttcctggggttcactgctcgtagtcatggatctggaccagagggcctagtccttgctgctccagtttgatctgaaacctgatcacacttagcattggcacctacactcaacctgcccctttccatttgggccccacgagtttgctttgcttctaaggcttgcagccttcagcctcagtctgggtagaagtctggagacacagatggttctgaccccttgatacactcttttaaaccttaaatgacaaagcttgcattctttttgttttttcttgtagatacttccctgttttgtgtgtgctttgtgtgtgttttgtgtgtggctttgaacagccattgctggttcaactttctgaacatcgcagcttgaatgttcccttggatctttcgtgttttatgtatttcagaaatcccaagcctgagagtgtgctttttaaaaaaggtttctgttccttctggctgtttgtcatgtatggtttccttactagtggggaaatccatgatcttgacaactttttcaacaaaagatagccccaagaaaacacttgtcttagaacttgctttatatctaatctattataacattgaaacactaaaagcaggatttcctgtctgtgaggaaatttgcaccctatagattcattgagcctgtgccaagtaaaggaagaaggctatgaatgattttctagaattgtagtttgtttgtgatttatcaagatcttgtgaaattttgctcattatccccatgacacaaatagctgaatctgggagattataagccaagctacgcatttctcttccagtaagagtctttaaatcatcaatatttggaattctttctcgaagttggtgtgggtggctgcctatctttaagagatcaaactccacagcaggaataaatactctctgcacaccttttcagctttcaaaagtattcttcctaagctttgagccttgctttccgatttttaatgtaattcctgtcttctggaaggcagatatttctatatgcttgtgtgtatgagagtagaaggtgtcacacatttgaaaatgattctctatcccataccaaggcaagctcttgttaagtgagtctgtttggtaggagggctgctaattagtccagcaacccagacctgtcaatagatgtgctgggaaaagacatatcaaggagaatattttcaatgtgcgtcttcattttctaaaccctaggcacgccctgagatgtcccataggaaacttgggaattcaggcagaggggacttttccctccactgagctgttggagttgctgccatctgcacctcctcaggttgatcagagcagcaaaagggatgttctggccacgtgggaggtccctggccatctgccttaggccccttctgtttagtggtagggactcccttgtgcacatctccatcttcacactcctgtgtccagtgcccattaggggctcatgttattaaaggaaataggctctctacggcgcaggtcattccggaagtccaagcaggattcttgtgctgagctgagccgtcaagccggggctccctacaagtggaggttctccaacaatgaggaagaggaccattaacatcactccttttggtgtctgcatggtgagggtgcccagggcatgatctcaaggttggtggtctcccctgttccccgcgtcaacacctgtccgcacttctttcttcctcccctggacccagggaattttatctggtctgggaattggggaatctcacttatgagcttacatccaaattctctcttattcctagatcagcttttaaacttcagaatgtgctttctgtctcatgatcccattgtgacctctttgctccccaaaactgcagaggaagctgattagcattggagggcagcctttgatatagaagtgatgaaagtgattggagtactggggaaggagggaggctagtcacatcttatcctccctctggctttgtggttttcaggtccactgtctatttctggattttgtgttattcctagcctagcagagtacctaggtgacctgaaccatgctttccttccctccttccctctttgcctccctccctccccacacaatccttattctctcagaagaagtgtgtctctgcctccactctggccctggctctagctgttgtcatcttttgtgcacttgccctgcttcttcagtacctcccggcactggtcagtttcctaatttatagtccccagaagtctctaattattgggccagctcatacttttcctgcctggccatggggtgaccatcccctataggttgactccccctgggtcaggtcttaaccagtcagtgtgaccaaatcacacaggtttccataggaggcctggagggagaggagtctcagctccacaaccccaccttcccatcctcagcaaaagtggagacttatgtggatgtgttcttgaaggagcatgaggctgggacacctcctgggagagcccaggttccaagtggaaaggggtcccttcctcccagctgactgctcctctttcaggtctgggggaggagaggaggaggaagctcttctttctggaaggagcctcaccaaatggatgtcatttcctggggcctgaggttcttccagttatttctgctatttaattttaatatctgaaagaattatttccctgggtgcactcccccaggcccagattgctgttgttcagagccaaagaataaactaatgatgcagtagccagttcttagggggcagaagaccagggtcctggcaggaggtgcagaaggccccttccccagcccccatctcctccagtattttgtatatttaagctcactttccacctcactcccaggggtatttttttttcatggtctttcaaggatgtcttttcacttttttggccctaagactcaactctccatttgtaggccatcagtgtctagcagaccttccccagctgtccagtagtctaaatctgtgctgtctaacgtggtagccactggccatgggagctattgagcacttgaaatgtggctagtgtgaatgaggagctaacttttttttaaattaacataaatgtagatagccacatgtagctaggaatcaccctagaaggcctagcaatgaattctaattcagtatcttcccttcctcgtttatgtcatcaacttgaaatcaagaagcagaagtggctggagaaaaggttgtcagcaaagagacactgctgctttactcagtcctctcaagggctggcctggctttagccatccaaacaagcaggatgtatagaaggcactgccaggccaccaggcttaccaaaacaagggaaggatgagatgttctggtaaggaggaaggacacccaagttaaaagctagaaaaacatgtatatgaccaacaagcttcctgctttggaacaagtcccagaacttctcctgacctcaatatccacatcaataaagtgggaacgcatggtaggtgctccgtcagtgttaaggtttttgatcttcaccgtctcttcccccgcaaacgccaccaaaggcagctcagctgtgcttgccaaccccatcacaaagtacctcctgtcacagggccagagcccaatccattcagacggagctgccctccttgtgagcaacagaacggggtggcgcaggaggcctctctgcaactggtgttgctgccatgcccagggctccaggagaggctgctcctgcagggttttttttttttttaactgaataacaataatcatctatatttatggggtataatgtgatgttgtaattacattgtagaataagcaaatcaggctaattaatatatttatcacctcacattcttacttatttgtgatgaaaacatttaaaatctcttttaccaattttgaaatacatattattattaactataaaaaaggaaagggagaagtgaaattgtctactaatgacgtggtcttgtatgtggaaaacccaaaaaatcctgccaaaagaccgttaaaactgacgaacaaattcagtataaagttgcaaggtacaaaatcaacacacaaaaatcagtagcatttctatacactaaaaacaaactatcttcaaaagaaattaagaaaacaaactcatttactgtggcattaaaaataagataggagtgcatttaaaccaggggggtttgaaatttgaggggacctgcatgatctggtcagaaaggtcccagcaacaactcacttgcagggcagacgtgtttagttaagggattttactctggaagagaaaaatgattagaatagcttgtggaatttgctgtttactcttggaaaagtgctgagcatgtccttaatttgtcagtgtcaacacaaagctaaaactggtgtccagagaggattagcacaaagagagtaaattatgtttccatacatcagtgatttaaatcactgcctcacccccttgatcatgagacttaattcagaaggtccaggtctaatcattcagccccacaggccccatggcttgctggtgggttgatatcctaggacctgagctggatataaagcatgacggcttagagcatgcccttgcagtgaaacccatctgagtcgtagtcctgaattttccactttagcttgtagccatgggaaagctgttttgccttcttgagcctcagtttcctcatctgtcacagcacccacctcatcaggctgccttgaagaacacatgaaagcaggtggatgaagctcttggcagagtgtctggcactgaatagacgataccttacttgtccctctgcttagttcttgctacctgtgcatgcccacccaactttaaagttccagcccctgcaactctgggcattttctggaccctcacatcctattctacctgaatactggacaggcaagaagtgccaggaaatcagcatcccccagaagaaggccttagacagacaggggattggtggtggataaatgcctgttccctctcgcttcagctgggctaacagaaacacatgttctagcctgcccccgaaagtacccccaaaggaataagccctcgctgtctgccccagtgccccacttggtaacacacctttattagatgctcttcctgccctgactcacttccctgctcctctcctggaacctcctgggatcccaattaaatgacacgcactgaaaaccacctgcttctgaggcacagcctccatagatgtcacctaccattattattatgcaaaacccacaaagacttcaggacgtacagaatcctgagactccagtccctcctcgacatccacagcaaaactctggccggagttgacctgcaaccagtttggttaatgtcttgaggctgggcaagatagaaggatgtttggggaatgagctttgaagtagacagtttccaatttgattttatcatggcgccaaatggtggtagaggagacataattttgtgttttagctcatccctgcccttcagtagagagcttatgcacattgcttagataccaaacgtttacatgtggagattagatacatgcagcctgctgtatgctcctcttcatcttacttgtttattactcagtccacctgttccccacttcatgtatttcctttttatttattttatttttatagtaaataagctttatttatttgttcttctgggctgacattgcagcagtcacagatctgcataacatagttacatgttgactatatctacaatttacaagagtatttttttcctctgaaaagcataagaacaaaagctaagtaaataatgaggtactactatttggaatgatcatatgtcatggcttaaagaactagtcttagcaaatattcagcaaatcaatctggataaaatagccaaccaaatgctctaatttatcagggcacactccatgttggcgctcaatggttttgtctctttgccaatagttttctgacaattttgtacctgggaaaactgcagaacaagacctgctgcttatcatgacttgagacttcagaataaacactatccagcaggagttttgtttttatgccatccttcccctttctctcccaagccagccccccttatatagtagagactccagataggagtttcaagcttaagaagaatctgatcttacagcagagaagcttccctatcccaggaacctggatatgcagagtgttctgcagccagtgtcttgaggagtcacttcctcctgaggacccacaccagaagagctacaggagccaagacagctgtctcaggctgactcccccagaagcagaccctcagacaaggaggccagggcagagactttggatgatggtcccaggaagtccactatggggagtgaggtagagaaggaaggcagccctgagggtctgtgggagagccagtgacggctggggagaaggaggctggagcttcatcccactggggaactggcaggtcatggagaacatccacaactgatgacctcaagcagggcaggggaggaggggcatctatccaccagctcctatctattgtctgtcgagggctgcttgggggtcccaaactcatagcatttccagtcggccccaccaaagccctcacacaaatggacgtcatggggtttgcatactcaggagagtggccgaggacgaggacgggcaccaacggtgcctgtgacaacacacaccagatcccacccagctgggccgctcaaagaggggtagacttgcacctgtgcccacccctaggcttcagctgaagctcccagcctgcagactccccgtgagtcttcttcccagcccctcattccacaggcgcggctgtgcggtgaggattcacatgcctcacgagggtcctctgggagtctcctgaggtaggtggctctggcagattctcctggagtttctccagttctgaacgaactcggaggtaggggagtgggagaggatgccctgcctctcatccagctacccagctttgacactccacctggaatggtcacaccctccgcgggtgtgctgtgtcaccccactgccagtctccccgatagctcttctttctattcagctcacatgtttcccttcctacccactgagccatgaagagcaagcgttttgactggtcccaaagcacccttgttctcttcagtgcatttcctccagtgctggctctgattttggacttgacaagtcctattggccctcccaccacttcccaggattagtgtggaggtcacgagtgcaagccctggctatgccacgtactgcctatgtgacccctaatattctgggcctcagtgtctccattgaggtagcacctacctcatgaagatgaagaagataaagtgtgtaacatgtttaatccagtgccccactcacaataggcacaaggaaatgttagctctcatattattttcatctcttctatgttggatcaggctatggtcacttcttgtccagaaagtggccatctaattgaccttcctggattcagtctattctcttccgatcaaaatttagctctaccaacaccagatcagcccttgagagcaacgtccaggtcacgctttgctcggaactatccttcctccatctcccccactatcagagggtccacatggcatggtggggagagtgggttttcagagttagacttcctgggttcaaaccccagccttgctgttttttaggtacatactacctaaagtaagagtataagttattttccttctgtctatcttgatttttctaaaaaatgtggataatgatagtatctacttcatagggctgtctgcgtgagaattgatcaatccatgccagatgctttgagcacagcagggcatttagtaaggacttagtaattgttggccattgtcgttatttttatttcagtatccccataatccatgtgatgactatgtttgcagtcttgcttttctcttctcataaaccccatgtatcacggcctagcaaaaattaattattcaccacccaccaagaaatcccagttcctgcctaggccccaaaacctttggtctccctgaaatccaactacaaactccagctagaagtcatttgcctcctggaagctttctttgacttcctataaggaagagtgggactttacactagcacagatctccctctactctaaattcccacttttctttgttgctgtcctgtaacatgtccttcccctcttcccagaatgatgttggagacctgggaccatgcctcactcatctttatgtccccatcatgcccagcacggcaccttgcatggaagaagtgctcattgaatgtgtagtgtgacggtgaatgaatgaagtgtgcttaagatcttggtgtctgagtatagggtctatccactaagctggtaagtgagtgatttagctgtggtttcataaggctctgggggtttcatcagtcctaagcataacaagatgaactttggggggccagaccttccttaagagacatggactaagttaaatactcaggaaacccctgctcatgaggcaggagagagcaagatgaagtaagaacacacaagtctcttatgccagtggcatgccctgtctctctaagaggtccagatagcttgggcattgcaaagatccagggacagcagagaccctgccctgcaaagacatgtgcatttcacagtttaagagtgactcagagccctttctgaacatttgcacaaagacatagcatctaaacaaacgtcatcattactgaggatcacgatgttctccaacttttattaaattaaattatttccctgaaggattggcttctatctactgagattttatttcagcagccaaattcagtgtcccacacatgaaaggtacccaaacatatcaccaactaagggcgggtggagtgaggtttgtaaatgtggctttggttttctaaccccattcagcctgagaggcaactactagaaagtaagcagtcctgtttgtcccaggctccaagattccacctagtaagggcccaggagtccaagctctttaagacccctttgtttccctgatattctaaatccttttttgtcctctttaaaggctcctgaaaattttcccaagctcttcccatttctggtgcttctttgttttcacagtttaaagaaactcaagggccccaaagataacttgtcctttcagtttgaacaacttatttaggaatttggaaccggatcccaaagtgctggttcaggggacatttgtaataaactgtcagccatcagcgctcccactcaccataagctagggacacaggttggtgcccattttcccatctctttaccttcccatctctttacctttggtgcccttaacccatccttatttcctaagatgcttcaccatttctcccaataatcccagaagctatttgcaaatagattttttgatgacatgtccttttacttggaaatcgccaagcacataggaaaatcaggtctacacgtggccctcactattgcgactttggtttggatgctttttactgattatcatgatgaatcctgagaatactgaaagataccctgctgcttgcccatgagtggattccaaaggtggtcatgaaacctaccttctcagctgtgtcattagcactctgattgctgctgttttgtgcaccaaggtagaagcctgaggatttattttttccccttattgaacttgttccagctgtcttttcctctgtactgtggaccacaggaattaggcagagggggtatttttggcagttagcttaatgctttttagcatcagaagctttcatgggaccagcggtttgactgattgtgggcctctcattctctcctggacccaagcccaaattcattggatttcatgcctttggtttttcagaattagtttggggtgagacccattactctcctttttagaggatcaaacctggaggatagttgtatccccatgcttagatctcagtgtacacattacacacacacaatgtatatttatggtactccaactcttttgtaaaatacaataggcactaatttttaacatattaggcacagctatttaaagtatgattctgaataaatgtacatttgtatgcatgtgagaaatacatgtatgtgtgtatatatgtgtgtgtgtatatgtatatacacacacataaatatgtgtctccgtggcaacccatacaacactttttgggtttacatagagtctgaacgtagtttgaaatggagctatgaggttttagaagacaaaattatttcattctccttgcaaacctgttcgtctcttagctttgccatgtcaatacttgtcaccaccatgcactgagctgcacaggctggaatcctagaaatcaaccttgatttctctctgtagccccacccatcagcaaggtctggccactttcaacctgggtctccatcccatctcctctccatctccacaagcatggcccttgatcaggccgctgcccatggcaagagctcactgatggatctcaccttcacatccatattccatgtgatgctttagaaacatacatgaggatcaagactgcacgatctggccctgactacctctcccaagttcatcccctcctccccgcaccatcatggcacttgggcctcagaccttcctcctgtttgacagataatccaggctcatcccatcctaggtacctggctgggtacagcccctttctttgataccactctgaccttacaccctgctgcctgtgcagtttgttatacatgtcccagttcttgcttgcgtgtgaaccctcaccaacagcctgccacctgaaaatttgattccactctttgctctgctgataaatgaatctgacctttctataccaaaaatggcaagaagtgaatcttcttgtctcccttcctatagtaaatagactatatagtagatagactgagtcagctcagagaggaatttgttcaaactagaaagggctcagtatgactaaagagatgactgactatgtcattccctataaaaccagctggcctttattttttatttttttaaaaagagtgttggaaaggaagtaaaaagctcctctgtgaatgtattcatatatacttgattcagtgatggcgttggcatggagacacagcatgaaaggggaacggaaggggtctcctgcactgtaagacatgggcagagacttttgttttctattgtgatccttctaataacatgacatagataaaccgtactcactgggcagcaacagaatcaccgtgctactctgagtgtcttgaaatcaactgagtgccgagggcctctctctctttgtcttttggggtaaggtggtgatggaactggttcagtggttaaaggagggagaatctgggtgggtgaggatgtcagtagcaacaacttgttgatttccatgacagctcaatggtggtgggtcattctgtcccagagccaccactgaccagctctacgaccttcaatatgtcacttgcccttcagggttttggcttcttcatctttagaatgaggaaaagcttcttaaggtccagcctaaagattctcaaggtccgagatctgtgatttatatagtaaaagaggaaggagctcctgggtgacctgaagcatccatccctagacagcagggacattgtcagattccccagaatgcaaccacttctgatgagcctgaagttccagggagcacaacagaaggcttgatattgcctgatgataagtccctagacagtagctgcgagcttgagcactggggtctaatcagacactccagggggaaaggctccatacccacctgtccagagtaaacaggtatggctccatgccctggggttagacagagtcacctgaccagtgcaggcagaaaaaaggcccacagctgctccatagaaggaataggactctatcataaataagagccattgtccccaaaataataatattaaaggtaagggcaagacgctagccagtgcctgccttaggttgcctgtggttcagcctatccgtgtgctgtagtcacaccaattctgaacctgtccacatgcatcaggatgggagttgagcagaaaggccccctgatgtttattgctgctctgctgtaagcccagccaccaggttaacaggccactggtcacccattttatttttcagtcacaaatggacccagaagtgggtattgagtgcatcagaagtttttctagaagttccaacaaataaaacaaagcaaaaaagcagtcagtcaagtaattaggaattcttctgtcctactaagatgcttacaaggaagagtggaataaaagaaacatggcatgtggaaatatgtcaagtacaaatacagcattcagttgttttgctcctgggccattaagaggaggagaactggcattgactggagcccactgtttggcaagaggtgtctggggccttccccatactctctagagtgtggattaacatccatccaagaatgtacaatcctccctattttataaatgagtaaagtaaggcttggaggaagaattagtccaaggaaacaaactgtttgtattgtggttagccagtgtatgtgtaaatacctcaggttcaatcaaacaaagaagtattacgaagagctttggaaaccagtgatgcagaatggagacagggagggataaataatacatggccactgcctctgaggagcctggtgtctcccaaggtatgaactgggaaacgttagaccacagcgaaaagtgaaagcagctttccaagcccccgcgtggagatcagagtgtcccaacacgtggctgttctgatgtccattttgcagatggataattaaggctcagagaggttaaatgagttgcccccccatgacagaagtattatctcctccatgttagaggtgaggaaactgaggcacagagaaattaagcaacttgcccaaggcatgcagctcacgaatggtggaactgggggttgactccaggctatggggctccagtgttccagtggtggggagggcagccctcttcccatggcaatggcttagaaggaagtccagccttgagcagtggacatgttgtttgatcagttttctcagcttttgatctagacgacggatctaagaacaacgttccttgattcctgtatgcagccaggggaccatggatagagacaaggactatggctctgccctcagggcccaatcagccagcctcaagtcaagcacaaagcagggctggatacttgcggaaggccccgcagccctccatgtccagacccctgagtgcttgggtctgccctcactgctccctcatccacaaggggcattgcatccccaggactgtctcagcctctggtgcccaagtccactgtggttcatggagtcaccaccacagtggggccccatcttggaaatgagcccggctgtctctcctggaggagaattcctggggtagctatggcagagcctcccatcaagccattcacctgagttcatcttctggaaaagggcagacaacagaggatcaaaaccaagcatccgttttgctacctttggcaagcactcctgagtgtctgcagaatggggagctcagtggtaggtgacacgttcagagctgaaagactctgcccatggagcacttgcaccagacactgtgctcggtgttccacacaccgtcttattccaccctggcaaccctcagagctaggtaccatagagacctgaaagtcacagaagtagggtaacttgccacagctgaaagataggatattaattggtataaagaggtcagcacaggctattgagagagcacattggcagccccctgattgggatgtcattcaagatatttaataactggaggcaacagagacgctgatcaagcagacagatatcagctgtcaacatccagttcagccaaaccaacacatattagctgaatttcagaactgcctgattcttcttgggcacagcatgagctacctttctggatatctactgctgcattacaaaacacccagtatttaatggattaaaacaatttgttatcagtcctgggtctatcggttgactgcactcagctgggtggctcctgcttcaggtctctcatgcacttgcagtcagacaacagctggagctaaagtcatgtgaatgctctatggggctgaacatccatgatggccccattcacacagctagtgtctctatgcttctccaggtggcttctctctctaacagaggaggctgaatggtttacgcagaagcttgaatctccaagaggcagaaagcaggggctgctgggtatttcgtggctacccctgaaactggcccaccatcactcccgcatgcccagatgtaagaggagttgcaaggtcacactgcagaagagcaggtgggatgcagtgataattccatggccgtctttgaaaaccatctgccacagcaaccttagaagaagaggcaatacctatgtggagccaggtgaaggggtcaaggaagggtatcccaggcagcgagacactatgcagaggcagaggggagagagaacaccaagcacctgtgcttataaatatagggcactcactgtggctggcatggttgggtcaagatgggagatggcaagagcttgggcaggagagagacttagatctttgagggtctccagtgcctaaggagtttagattttatcccagcagcattgaaagccattaaggggatttgatcaagcaaggagttgacccaaccatatctatatcttggaaagattttgctggctgtaagatggagtagatgaagacaggtagaccagctgccttcccccagctgtcccacatctcaaaagaagagctaccgggataaagccttgttgtagctttggccttagccctgtcctggttcttcattctcatctgagcaacaaggctgcataaaagaacagaagccctggggcagtggtgtttgcagggttcagttgactctatctgttatgctcatttgtctgagattccggaagcctttgaatagcacttgtgataattacagaatccccacatatattgatgaaaaacagctacataaatagcaaagcttggtatttgtgaagtgccagttttctgtaaatatagaatgttggcagttactgccgtgtggtttgtctactctctggagccagcactggttttattacagccctttccagggagggttttatatcctgcctacctgtggccagtccactggcctcacaggtacaactgcaaaaagcaacaggcaatctgagaccaagagaggcaatcctcaatctcttttaagtgtggagagtcctgtttgacatccaaaaaggcttttctgttgttgtttttttgttttgttttgttttgtgacggagtctcgctctgtcacccaggctggagtgcagtggcacgatcttggctcactgcaacctctatctcccagattcacgtgatcttcctgcctcagcctcctgagtagctgggattacaggcatgtatcaccacgcctggctaatttgttcgtatttttagtagagacaaggtttccccatgttggtcaggctggtctcaagctcctgacctcgtgatccacctgcctcccaaagtactggaattacaggcctgagccaccatgcctggccccaaaaagtatttttagctattcctacatctatgtgtagagacccctgactgctttagtaagttgaggctccttagcaagtgtataaggtacagattggaaaccaaggcttatttgtagatctagaccagcattttccaaactgttttctcaggacactagtgaaagaatgataggtattgtataggtattgtatagaaaatgaggatctcttaatcaagtgtttaagaaatgctaacttactatgtattttctaaatgcagggtttctcacaaactttaaatatgctaatttgggccatgattctgcacaaaggaagtgtaatagctgggttttcaaaattgaccacagaactctttttaacagagtattttacaggagtttggaaagaattctactttgagtaatgatgactaaccatcctcaaggctcattaattgatctcagctcagctctcaaaggagtgatattgtatcagttagcttttgctgtgtaacaaatgatgctacattttggtagcttaaaccaatggctatttttttaactcatgattcccttggtcagtaatttgggctggactcaactgcgtggttcttcttgtcttggctgcctttctcatgtttctgtagtcagctgtcagcagttagaccagcttggttttggacagttagttggctgtcagcttgggcaatgagagtaactgagtcacatgctctgtcatccttcaccaggctagccaagtttattcacatggcagacaaacagggttcccagagatcaattagaagctgcaggtcatactgaggcctaggcttaaaactgacacaacttcccctccagtacattctattggtcaaagcaattcaaaaggccagctgctgtgattttcaagccaaagagaaattagcttgagaaataggggcttccacattttttataagagagtcttaggggaggtgatttgcttgagagagaagaactggggttatttttgaagttgtgtctgcataacaaacaaaaagaatcttggacctagattgcatatttatttagggtactgggagggtgtcttagtccattttgtgatgctataacataacatcacagactaggaaatttataaacaatagaaatttgttaatcatggttctggagtctgggaagtccaagatcaagaggctggcatctggcagggtccttcttgctgtgtcatcccatggcagaagggcaaagagaggaaaagggagagagaagatagggaggctgaacttgtttatttgttttaaggagcccaccctcacaataatggcattaatcccctcttaaaggtcccacctcttaatttgccacattgaggatcaagtttccaacgcatgaactttgggggaagcactcaaatcacctcagggagagatgccgctgatggagattatgtggggctaaaaccacccctcaatccactcctcagtactctcattggaagtgagtctaaatttctctctctcaataaataatataccaaaagcccaccaactgaagatgactaggaacatatttgtagtcatacacagtacaatgtttgatttttttagcaagtgcaagcaaggttagacctgcccagaggaactttgggagtgtttctgtaaggggaagattggctttgggatgcatgactctgaggacagatgatggagtggggcaggtctgggttggatgctgctaaaaagtgggggtaggccatactgcccaaggtaatttatagattcaatgccatccccatcaagctaccaatgactttcttcacagaattgggaaaaactactttaaagttcatatggaaccaaaaaagagtccgcattgccaagtcaatcctaagccaaaagaacaaagctggaggcatcacgctacctgacttcaaactatactacaaggctgcagtaaccaaaacagcatgggactggtaccaaaacagagatatagaccaatggaacagaacagagccctcagaaataatgccgcatatctacaactatctgatctttgacaaacctgacaaaaacaggcaatggggaaaggattccctatttaataaatggtgctgggaaaactggctagccatatgtagaaagctgaaactggatcccttccttacaccttatacaaaaattaattcaagatggattaaagacttacatgttacacctaaaaccataaaaaccctagaagaaaacctaggcaataccattcaggacacaggcatgggcaatgacttcatgtataaaacaccaaaagcaatggcaacaaaagccaaaattgacaaatgggatctaattaaactaaagagcttctgcacagcaaaagaaactgccatcagagtgaacaggcaacctacagaatgggagaaaatttttgcaacctactcacctgacaaagggctaatatccagaatctacaatgaactcaaacaaatttacaagaaaaaaacaaacaaccccatcaaaaagtgggcgaaggatatgaacagacacttctcaaaagaagatatttatgcagccaaaaaacacatgaaaaaatgctcatcatcaccggccatcagagaaatgcaaatcaaaaccacagcgagataccatctcactccaattagaatggcgatcattcaaaagtcaggaaacaacaggtgctggagaggatgtggagaaacaggaacacttttacactgttggtgggactggaaactagttcaaccattgtggaagtcagtgtggcgattcctcagggatctagaactagaaataccatttgacccagccatcccattactgggcatatacccaaaggattataaatcatgctgctataaagacacatgcacacgtatgtttattgcagcactattcacaatagcaaagacttggaaccaacccaaatgtccaacaatgattgactggattaagaaaatgtggcacatatacaccatggaatactatgcagccataaaaaaatgatgagttcatgtcctttgtagggacatggatgaagctggaaaccatcattctgagcaaactattgcaaggacaaaaaaccaaacactgcatgttctcactcataggtgggaattgaacaatgagaacacatggacacaggaaggggaacatcacacaccggggaccgttgtggggtggggggagggggagggatagcattaggagatatacctaatgctaaatgacgagttaatgggtgcagcacaccaacatggcacatgtatacatatgtaacaaacctgcgcattgtgcacatgtaccctaaaacttaaagtataataataataaaatttaaaaaaaaatgggggtagtttggtaattggatatctccatagtatctgtccaagatacagtacatgttaagccacggtgtggtttccattggtaagaaggtggcaacggtcactcaaaagcaagatgttggccattttagggttgaggttcagccttgtctatgtcctgctagacatgtttctcaggatccactggcttgtgtagaaacatcaaaattctcttggaaatagtgtgatttgatcgtcagtgggtagattattgtttcatcacagaccaggatggaagctggtcagcaagagacttaactatagatagagatagagacatccaataaaggatgtgtatccagagtatatatttttaaaaactgttaaaaatcaataagaaaataacagacaactttgctttttaatgaaaaaagcaaaaagacttgaacttcatagatgagaatgttcaaatggccaataaacatgaaaagttgtttgacttccttattcattagggaaattcaaattaaaatcacaatgtagtaccactatacacccaccaacatggctaaagaaagacgagcaaaaccaagtgttgacaagtatctaaataaagcaactggaattctcatctgcttctggaggaacataaattgatgcactcactctgtaaaactgcttggcactaagtagtagagctgaacatatgcatgctccctgatccaacaccactactccccgaatcaacagaaattcatatatacatgcaatgaaggtactagaatatccacggcagcactgttcatgccaagcactggaaactaccaagctgtctctcaataacagaaaggataaactgtgctgtgttcaaacaacagaatgctatgcaacaatggtgataatctaccatgatccacaactgcatacaacaacacggttgaatccatgaacacaatattgaaccagacacaaaaaaagtatgggctgtatgatcccacttatattaaggtacaaaagcaggcaaaactagtcagtggtgatagaagtcaggatgatggttagagactgtggggatgtgcaagagcttctggggtgatagttacattctgttgtttcttgggctgattacagattacatagttatattcactgtgtaaaaattcattcaaggtattcacttctaatacgtccattccaattagaaggaaacataacatcagaatccttgtgttgctggtgacatggcagctctggccacactggagcacagtcttcctcctgccctccccacctctgggcagcagctgaaggtgaaatcctatgctggatttcagctgggggcagggttccttcacaccttccaagttggcagagacacagctttgagcctcgtggccttgtgtggggtcgtgagcttagtctctggagccagcctgcctgcaattctgctgactaataaacatctgccctcataacactgagacacagtaagcactatatttatttttgccgttattttctgctccattttacagatttaaaaaactaagattcagagtggacagatgattttagaggaagaagggggagacacctttcctccccatcataagggtctcaactgacactcctataacaaatgtcaggttaacaagagaaaagcataacaaatgtatttaatcaagtttcatgtgacacagggaccttcagaaatgaagacccaaagacccagggaaaattatctgttttgacacttacgtttgatgaaaaatgggcagccatataaaaatgtgattggacaaaaagggtgtaatctaatggcaagagattaagggggaaacctagcatgcctgtgtgttcagcttcttcttagcctctctgacttggattttttccacctaaataggaggcagaactcttctggaatgagagtcttcaagggagatggagagggagaaagtgacctttcggaattgtatggcttgcttttgggagagacctgttttgggcaataggaattctggtttctgtggttcacttggcgggagaagagggatgggagacaggagggcagaaagtcagagagaacttgcttctgagccccttccagtgtccttcggttcaaagtactcagcataccaaggtgccacacttcgggatatgatgttctgagtcccagcatgacccatcccaagccatgcagtaaaacacgttcagtgcagagctgcaactgggaccagcatctccttgactccagaacttgtgttctgaagcattcagccctttcatcaggaaggggagaacaaggaacgcagggagtggtgctcctcgagagagacctgctctctctgccatcgctggaacagccagaagcccctgaagccctccacacaagggctctgcctgaacacccattttttaaatgcaaactaattcttcagtctgccttggaaacgcaaaagctgttcttttacacaaagatgaaaccagcaggctcgcagaggccagtaacacccactcccctgcatcataagttccaaacagtgtgtgagggacagagccagcgccacggtgaggagtaaacatcacacacgccacacgtgggtggttagtactgcatgaagcccaggggaggcccatttcctggcattctgcttctatgttttagtcagtgctgcattcatgggtaagtttgcatttgatttgctttatttccaaaattatttccagcaatggaaagggaagtcgagaggaaaaaaccaaaacatttcccatcttccgtccctttatatagggcagccttagcccactcattacatcaccaaagatctattgcaaatgtcagtgaaaagaaaatctgttttgataacaatgtcactttagatgtatttgaaatgtctaaatgttggtgcaattttgatactaataatcctccccgtgtcccaaccctactttttgtggataaccccgcacaacaatccttggtgggaatgtcagatgacgacttgaaaggcaactgctttaagaaaaccccatacacacagctcatgtgttcttctgatttaaaagcagctttttactttagtctacatttgtagtggacatatttagcttaaaccttacagcaagatgtacctttcaggataaaacccatgtggaaacctttcaggcagaaaagaatggcttgtatggaagtcttaatagtaatggtaataacaaggataatggcagcggctgcagcggggagacgtctctggaagatgttggagctatcctaacactcctccatccccattcactgttatctgcctgtcccggaagcctggcttccttctcttctcttttttcccacttttaggaaagcccatgtccaggagcagcctcccttttgttgcctcctgcaagccctctgtattagcacgtgtgtgtctatttacacgcaccattaagtgctgtccctcagttagaacaggtgctgaaggaaggggattggtgtagtctaaggatgtggggcacccccgcgccctccgcccccatccacttggaatcccaaatccctagcatctcaggattgggaagggtctcaggattcatagtctcactcctatcaaagccattgctagagaacttagttgccatttccggaatgctcctattaaactataaaaatcccacctgagattgtaaaaacttttgcactattttgaaaaaagtcagggaaatgtgcttcccagttggcattttagttggccaccctttcggggttgggcggtgtgtgcggctatgggtccatctctcctctcacacattctcgaggtttgcacatccttacctgtaattaattagtcagcacacactgtggtgctcctactgtgtgcactaccagccagcctgtgagtaaggggagcaaggaacagggagaggaaaaagcctcagctcctgcccttccaggttttccaaaccaacgcaataccaaatgagaatccaagatatctcactccacagagtattatcaaatcaaatgaaggggggacctgcagccaggctggaaggtggcattgaaaggggagagatagcaggtggagcagtgttcagaggcaatgcccagaggaggaaacacacttaagttgatgtgaaatgttgaggtcaaggtgaaaattgcagttcaatttatgcagtccaatcttcacctagagaatgtgaagttgggagcttgtgcatgcatatgtttactaggtattgaaattgtatagatgagtaattaatgtgtttgagattgaaataagctgctggtcgtcattttgaaatctgtctctggacttcctcttcattagaatgcaaacctcagggcagggctgctgcatcagggtggtaaattgactggaaaccacgcctaggacttccaggtgaaatcacctgtgttttgtttttgaagttgccaaggtttattttcttcctgctgtgttgttgttgttgcttatgactgcaagatgaacattagagtatcagtagaatctgcgtctgggggctgatagtcaccccagaatgagagctgcctcccaaaatgaaagagaaatgtttcagcatatagatgccagctgacacgtctttgctactgtaattccataagtgttcagcccagattgaggctgtgcctaaggaaaaatgaaaggaatgtacccaagagattgagtattggtggggggctatggagaggaagggatcggagagcccctctgagatcataaacccatgagagagaaggaggagcctctttcagaagacaaccatacaccagacttgtttggacatttatccagaatctccaggatggtctatggagttcaggctgacctaattctccttaacagagtgacctagggagggttactactgtcccacagattcagttttagcatctgtacaatggggataatgacaccaaccatgcagccttaaagaaagggttacattaaggtatgtgtttaaagcacttaggaggaggcctgagacacagtaagtgctcagtacacatgggatttttattataatgatcatggccttgtctattcctcaaatgagccagggaggttcatctcactgtccccattatacaggagagtaaaaaagagctttataaagatcaaaaattccattagatgaaatcgcttcttcaaggttatacattcagtgagtgacagtaccaggaagtagccacatgcatgtctaatcctcacgtgggtgttactacccctggagatgagcctatggcaaggaaagaaaaaaccggataccagtggttttttgcagagaaagtgagctttgttttgaaacggcgtgtcacagacaatgttggcaaagccaaggatgctaggccataaatttgagcctctggagggcccgaactatgtagcatttattcagtgagtacttactgatatcctataatgtgccaaggtggtgctagtgttgatgatgcaaaagtgagtgaaacactgaagcagagtgcagctgccaggccggggagggaggccaacctgcggtgctgcatgagaggtctccccacagcagcagagggagggagaggtccactcccaccgggtgggagggaagtcttcacataggccacagaggaagtctggcatcttgggctctaggatgaaaacagtcaccatgctttgtgcgtagccaacccccagtatatactggttgaattgctaaataaactaggtttcttaaaggtggtggtacccttatttgcaaaaaggatagcaaaactctgaacacaagaatccagtcctgcctcgggtacaatttatggctgtaaagaatgaggtttatcttaacagacattccataatgtacaccctgaaatgagtgctgcctcctttggaacagaatcctgagtgactccacatttattcctgtgattttgcctttatcccaaacagttttggaactcttctttgtcaggtgaagagttttgatgtttacaggtcccaccagaaagtcaaactcaatttgttactgcagtcatacttcatttctaaccaaaaatatcatttcccagcctgactgtccacttgattcatgtattttacctccgaagggtttttagaccattttccaaattcaaaacaccctctaaggacctagtttgccacatttgaagttgttagaaaggataagccacaggctctaaaagcaattccaaagaacaggagcaacactacagaaatccttcctcaaggacccctgagaggtgcccagtgtgcacgtggccctgtagaagcccttgaaaagtgagaaatagaccagcatgaaagatacacccttttcattctctgccttagttctgagacattccagctatccagatgttacacagcaagagaatcaacagagagctcgaaagaaaaaacaaaataagcataaaagtaacgtgaaattctagcgcttgtgtacagatgtgggaggggaagcctgactgagtggtaccatttttgcaccagactaaaattcacagggttaaagattgtaggagggaagattgctcatcataacacccactcttcctctggggcatttttttttagcaaagcacaataagaaaattaaaaatctgttatgcatctgataaccaccagtgcaaaattccgataaaaactggatttatacactcaagcctgagattcaagtgattcctctttctctctccacattggatccaagatggcagttggcaaaatggacctgacaacccagatgggacagaaagaaagggagcggacaggaacccaaggcagtttgaatgaagcaactccaagcaatagtaaagcatggccaccatgaacttgaactctgacctcagattagctttcttatcggagccaataagggaaacgagcagggaaatagaagcgtggaaaggaaatgcggcctcctcctagcaccagatccaaggattaaggaagaataaggctatatgggcatattcataatttttttaaagatttagtagaagatagatcacacggggtttaaaaacaatgcagctctattgttttgcttccagtgtttactaggctccaagtggtgagaaggagaagtgggacataaacatgggaaatgcatgaagcggctcttaactcaatatactcacagtgtgggtgagaaggcagcacataagtacatgcaattatccagctctgcaggagcagatatgagttcgtgagcagtccagacagcaagtgtggacaaacgcaggtcgggaggagaggaattccctatttccatatggatctcccaatgctcagcttctgcaagactcctcttcagaggtgctccccctggagtcagctggcctggcatccgcacttggacagagctgctccgtgtatgcagattgggtttaatgaagaccagattaaatggctgctttttttcggactcttgctcccatgtggagttgaaaggaatcagacaactaagtcagccacaccctctggccctgggaagagagtgatgttagcaggtccctctgagataggcatggggacatgggtctgggccttgctgcgttgccacccctcatccccatcttctggtctaatcacaagaccacctgccccccactggagcatatcctgcagtattttcccaggactgggacaaaatgcaatgactggtttggaggcatgtaccttttcaggttcccagaggagtcaaagaacagtgtaagttttgtttttgcttttcctgatgtaaatggattgattcgaatagtgctttcatttctttggacgtaaacaccattccttataataacccataaaacaggtcatcgaccggccaggcatggtggctcacacttgtaatcccagcactttgggaggccgaggcgggtggatcacgaggtcaggagatcgagaccatcttgactaacacgttgaaaccccatttctactaaaaatacaaaaaattagccgggcatggtggcgggcacctgtagtcccagctactcgggaggcagaagtaggaaaatggcgtgaacccgggaggcagagcttgcagtgagccgagattgtgccactgcacttcagcctgggcgacagagcgagactccgtctcaaaaaaaaaaaaaaaaaaaaaaaaaaaaaaccaggtaatcgacctgagccttcttagtgctcccttctccaggacgcaggatgtggctgaaaggagtatcttgatgctataatgagtcttcatcctctctccctacacccctgagcctgtgtgggaacccagacctagaagatgagacaaggctttgcagtgactgccagaaactaggccacattcctgtgacaccgaaatcctttccttccttctcccatcttttaaagtaatagattacaaaccaaatctcatcaatgcctaaaacagagctgcttgacagaagtgggctggaaggaccggagccctgctccctgaaccccatcaccctcatgtctgtcccactcttcacctcctccctgcaaggcagctgcatagaatgttgacaactggacagcatagcttgaaaatgctgcctcctttttttgaggggaaagggggtggggggcagactcgcaatttttaaggtcctttccaatttggagtttctctgattccctggggcatagtcacataataccctcaagccatctgctcatgggagtaaatccagaacttgccttcccaacctggtttctgcctagaccactgcagtcaccctgcctccaggaggggcagctctggtgcattcacactccagagtccaccctggggtcaggctgaggaagcatcccccacgccttccctttccacccagccactgcatgcccacagggtgctccaacaactctgacctgcttccatttcttcagacaactaatctctttggaaaattaactactgctcctccctgaggtctcagctgagaggtcccgctctctgaaggtgtttatgaccacccaggtcagattctgtgtcctgcctgcatgagctagtctccctctgcactattcctgtggtagctattatcacaacatgtaattatacattgtggcattatttgattagcatctttcttcctcttagtcttaatctacatgaggatagggaccatgtcaatttcattcatcattccaaccatagggcctaatttagtgtgtaacacaccatgaatgtcctataagcattcagctaagtgaaagaggctaggtctaaagttctagatgctgtatgattttagtgatatgaaatttctagaaaaggcaaactaatgaggcaaaatgctaatcattggtgacctgaagatgaggataggagtaaggactggctgcaaatggacatggggaaatattctggggtgatggaagtgttctaaaactgggctgtggtgatagttgcatgatttcataaatttcctcaaaatgacaagtgtacacctacaatgggtggattttgtgatatgtaaattatacctcaataaagctgttcagaaaatgaaatgaaatgaagccggatctcacaggtgactgcgttcactcggctgctgtcatatttccctctctcctttgtccagcaaagagatgtgcactatcagcagaagctgagtgaatggccaggccaaaaaaaactgcctctcccaccctccccttgccctgagcccagctcagatgcagatgctgaaactgcagttcctttgatggtatgccagagccagggcaagagaaaaattcatgatgtctaataaccctcatctctggttgcagctctgtcctctctctaattaaagagatctcctttgggcgcagcccagaagtcaggacatctttgcagctatcactgcagagtttagcaaaataaccaagtattgggaactgtggtacagtccaggattttttcccccagatcaaaaatgcccagacaagttttgttatttttagagttcttcttctgactacattattttctcctctgaattaacatggtcttctcagtcatcatgcagaatagttcagtcccagtacatgaagaatgtgggcctggtatcaaaaggggctgatttacaagcaaggctgatgttccgcgcttctcggctcttactgggccagcatctgtcctgagttgctggtgctcatgccttacctggtattatgtatttggatgacccctctgcttacaagtagcacacttgtctcaaattagaagacttggcctccaatgtaagtttttcgttttcccatatgctaacactgtaaataatggccctggaaaatctgtcattaattagaaattttcactatagcagtttttttaatttaacaatgagatgttatgtgacatttgactctaaataggtctgtgcactagtatggtaggctaattgtagtaacaaataaaccctatgttagttttctattgctgtggaacaaattaccacaaacttagaagcttaaaacagcaaccatttatcatctcagatgtcagacacagcatgattgggttctctgctcagggtctcacaaggctaacgccaaggtgtcagccatcaaaggagaatatccgtcaaggcaaatgcctcttacccttggaatctctttcaacagaaagagtccagcctcttttgaggactcccctgactaggttggacccaccaagaataatcttcctcttttaaggtcaactgatgagaggccttgattacacttgcaatatctgttttcagcagcacccatatttgcatttgaataacaccaaggtgtgcacacatcagaggttatcttaagagttctgcctaccacaaatgcctaaatgcatcatggaatgaacataataagggattatttcttcctcacacaaatattccaaggtagttgcaggtcagggcagtagggttagctctttccatagagccaaccaagggcatagactggtggaggccctgctattttcaacaagtggctttcaagatctttctgagccttaacggccagccagcaggaataaaacacagaggcacatgagacaaaaggtctttatggaccaagcctgagagtggtacctgtcactttgcctgctcacattggattaaatagaactcagtcacatgatggcacctaactgcaagggatgctgggacatgctgtctttagctgggtagccacttctctgtgaaggctttacaccatgattaaaagagcatcagtttttggtagatagctagacatacctctaccatgactgaattttagggaaacaatccagaaggaatacatgtaaatgaggtatattgtcctccaagattaaaagttgatattgtagaatcaatatctcaggtctgacctaaagacagatcattttttaaatgtcaacatatgtattattcataatttaattgctcaatgtatttactagattcagcctcaaaaacctttgacttggccaggtgtggtggctcatgcctgcaatcccagcactttgggaggccaaggcgggcggatcacttgaggtcaggagttcaaaaccagcttggccaacatgctgaaaccccatgcctactaaaaatacaaaaattagcaaggtgtgttggcgggcgtctgtaatcccagctactcaggaggctgaggcacgagaattgcttgaacctgggagatagaggttgcagtgagccgagatcatgccattgcactccagctggggcaacagtgcaagactttgtctcaaaaacaaaacaaaacaatacaaacaaaaaacctttgactcttgaaaaaattatatccacttccaactgatgaggggttaaatgattgaaattatcccaaagaatatgatgcaggtcatcaaaatctgagttccaaatatgttttgaacaatagaaaacatgagaaaaactacataaccttccaaaaccattactttgaattgtgacatttatttgaaaataaaacttccagatattttatttaaaggatcttatgttgtttgagtcacacttcatcattatcagtccttcctgtcagggaaaagtgtgtttgggagaaatacaaagaaaagctttgagttgccaagatagcatttactaaatttggtcataaaaaatgttctgaaacttactttctgtatgctgttttagaggcagctcaagaattacagaaatttccttttttctacactcttaatttttctactttatgtatttctttttggctctttaaaaggcaacagattaaaaaaaattagaggaaaaacatttgttctactaatgtgtcacttgagaatcccagacaatacatagtatcattgagctaaaatgtgttgtagcctatagaacttagcacttctctcaaagagagaaggggagacccaatgagagaggcagacatggggtgaggccaatgaacactcagaaattaaaaagaatagttctaccttcttgacttatgtgtagcaactaaatcacaattagagaaagatacatgtgtgagtgtgtgtgtgtatacttgtgtgtgtgaaggtgtgcatgtgtacaaggaaaatggaaaatgcatttctacctagtgtcataatgaaactaggttttcggccaagatattttccttttgcctttgcatatctgtggcctactggacccttatattgtacctgtgtagaaaggaagcctctaagtctagttgagaggcaaagtgccttgaaggccgtgacccattaaggaaccatattgaagaaatgtaaagccaggcagtaatgaagagcatgacccattaaggaaccatattgaagaaatgtaaagccaggcagtaatgaagagcaaatgaggccagaggtgagcacggtaagtaaattagacccaagtgggcagtgaaatctgagagcaaatgagagtggtgaggaaagaggatgagaacgtaaggcacgggccacatggactctgcatctttagcgtgctgtttggccacagggaatagaaacccaacaaatagtggcctaactcctagatgcctgtttctctcaagggaatggattcagaggagccacttcaaaagctagtgcagtgcttctgcagtttcattaatgcatcaagcccgttccatctttccacttaacagagcttctctttggtcctcatagtttcaagacggaagtgaaaggactgtgggagtcaggacctcacatggaataaaccaggaaggcaggaggtgaagatgagaatggaatgcatgaatttgaagttgaggaaggtacagtaggtattcataatgataaggtctactatggtatgattatggaggtgagtgaggttggatggacaagacccttggagaagaaatcaagaaatggagaagcaggtattaaaaagatcatctacaggtacattgaaacctccaaatattaaaacagaagtggtattttaaatgaattatgactcccgcctccccatcccacattctataaccttccattgtcttcatggtgagtgtagagaaataaatgccttggtggagttgctataacatgccatgagtcgcttgtttttcctcatgtgcggtttcctcctagcctcttctacagacctcatattgccctgtgttggagagagtgccaccctttagcctgggctgccatgctcctcggctcctgctgactgagacactctggcagaaggctcttccctcctttcttcccataggacatgctctcagctctcctcccaagtcctagcaatcagctacaagaatctgcttcattactttcatcctccttccctccactgcccggaggaccaggcaggctgctctcagctgcctgatctatcattggggctcaaaatacatcaaactctcttaaaagccaaaacattttttaaaaaaagaaagaaaaccaaaaacccaaaacttgtctttcactgactgtatgtggggctactcacgtcgccactgcttgctcttttatttgcctggaagctattttctcagtttagttacctcccacctaaaagagtttagtttccaagatctacctttagggaaactttttccccgtctttgaatctttcattgttagtacgttcctagaagtatttctgtccccttaaaaaatgtgaaaattgcatggggccctctgggtctcaggcatcagccagaaatgggcaggtgagctggttcttctaagactctctctccagcagaggcaaaagggctctgaacaactcccctcccacattcccaaatcaccaaggacagcccagcctccctcctgtctgcgcaagcaaagctcctccctctcacattgctgtctacacagccgcccagcaactaggggagagaccagcaaatgcattctgctgactctgactttaccccagctttgaattttccaggtctttagaatatagctgctcctgtgtggccatctacatagaagttcagaaaagtaaatgaatcttcctatttcccccaagttaagacacttcttgccattatttgattgacagcataaatcattcctttactgtttgccagctgggtctctgggctccagcaaggaggctgaatacaatttcattatgaaacagcacctgatttcagctgatcccattcactttcactttgaggttaaacaattcaaaagattctttttttccttctttctgacccctctttaaactccctgtttggcgtttctcagctgcctgcactctccctggcctgtaatctcacagacaaaaagtctccctccggtgactcctccagtgtcagtttctgtgacaagtatggacaggattaggtgacagcctacatctgtgtcatcttgcttcatcagaggaaaggggagggggccacgatctgtaaaccacaaccagcaggaatttgtcctgtgcagtgcgggcctgtgattgtcaaggtttgcaaggtccccagactagggacctcgcctttccctcgttccctccatccctccctcctcccttcctccttccctccctccttctttccttccctccttccttccctccctccctccctccctccctccttccttccttccttccttcctgtctttctaaaattattctggcaaatcacaagcagcttacagaacacagggcagcctccgcacctttgtgtgcacgtgtatgtccgtgtgcacacctctgtgtgcacatctctaggtgtgtgtgcacctgtgtgtacacctctgtatgtgtgtgcacctttgtgtgtgcacttctgtgtgtgtgatcaatgtaggtgatgcccagtattcacaggacacttaaaaaccatggggaaatagaccagtttctgtatgtgacttgctgcatcacaaggaagtaaggtgactttcatggtgagtgggatacactcaattcagaaaatgagaaatctcatgtatggaagggtagaatgacctctctgtaacacaactgtgtacacttcaagaggtcatagttcaaattggaataatccttccttctccctcagaacatgtctttcatatgatgaaagacccagcatggtactcagtaaataataacagaatgactggtgaggtgtgtaaaactaatgctgacaaaagcacttggtagcaccgatgctgtccatgtcagctggctgatatggcaactgcaagccttgtaaatgacattatgaagttgaagatgactccaaagactgaggagcaagagggcatgcattggagtgtacaggtgtggctgagactgtttccaaaatgtaccccaggggaaacataaaatatttgagtgcaaaaaaagacggagcgtataaagacacaggccagcctgtgcattttttgggtgaagttgtagataacttacattggcagagtagacaatctgagaacagcaggagggcagtaggcagagtttgtcaaaaggaggaaaacgattcagaaaaggcagaaattgactctaaggcactgaatgcaaaccaagaggaatgaatccaatgataacaatgcagtctaagaagaaataacccagagactggaaattgggtatcctctatccagtatggtggccagcaggcatggatggctcaggcacatgtgaaagtgccaagtttaaactgagaattgctgtaaatgtagaacacatgagatggcaaacaggaggagaaagaaagtaaaatgtcacattagtatttttatatggattccatagtgaatgataatatttggatacattcagttaaataaaatattattaacattaatttcatctttttttaacctctttgaactaaaaattttacttcagaagtagaaatttttttcattgcatatgtagctcacgtgatagttctctttgatggccttactccggaagtgcttctaacagagtttgtggagagaagagaaaaggtggaagagagataatattgtgatggtagaaattacactgggctcagagttcacttcctgggtataggttattgagcattacataatttcagaaaacctcagtttcctcatctgtaaaatatggtgcttgctaataatgtctgtttgacggagttgttgttaagcctaaataggaaaccatgcaaagcctctaatgggataccttgcatgtagcagaaggtcctcaaagagtagttcctttcttcccttcctttcccccacccagagtaatacatcaggggctccagaggcagcaggcagagctgaaataacctcagtgagttctgaatgtgccagctttctaaatgcattggattgcaggagatggggcaagtgaaagaggagcagaaagctcagtggagaagtcagagtttagcaaggactgcagccagtctgcaatgacaaagccacccaccaatttaaagggagcgtagaatggcaacagagaacaagtcctgatggttagcaggcaggacttagaagttccctgtccagttttgctaacagctgctgtcagatacaattggattaagcagataggtttcctattaggtaaagaagtattattttctaattctttgtggtttcgtaaagccaactctgagttagccgtagcctcagcaacttgcagcaataatgaatcttcaaatagaatttagcaaccctgagaaagatgccaaaactcatgcttagtgttgagctaagagactcacaaagagaagaacttatgtacttgctactcataaataagccacccaccaagggacaccagataacagtgaatgtcccaggatcctgaagaggctcagtggtggcagcaaaagcagattatgtcagaggcccctggtcgtgatttgacacttcttaaagaaacaaaactgaggccaaggaattctgatgaatgagaaattcatccagttccaatctactggatttatacttcaagaatggccatatttcttcttccattagtctcgacaatgggaaagaaaaatagatgcatggctatcctagaatggtagacaatccctggattactccaggaagtattacaaaaaccactggtctacagagacttaaagagatctgcttctgctgtaatggcaccagtgacttgttccttccccactgagaaaattgagtctgtcttctatggacctcagtttcttgatttgaagacgattaacagaacagagcatcgtaaaaccagttcccttattttatgcattcaaaagaaaccccatctttgtacatgactgaagaatattgtaaattactctgagttttgaaggacccctctcctccctatgacaaatacaccacaccaagggtttcaaaaacccaagtcaagtaaatgctggtagtcacaaagatgtacaaaaagacatggaatgtgtctcagtcaattcaggctgaaataattaacaaaatagcttagactagtgccttataaaccacagaaatttatttctcacagttgtgaaagctggaaattccaagatcaaggagccaggagatttggtgtctggtaaggcctttctggttcagagatgccacctttttgctgtgtcctcacatggtggaaggggcaaggcagctctctggggcctcttttataaggatattgatcccattcatgaggggtcttccctcatgacctaatcacctcccaaaggccccacctcccaataccttcatattgttgattaggtttcaacatataaatttgggggggacatacacattcagaccattagcaccaccggcatccagagttgcctgtttctcatctccttctctatgtgccttaggcataaggaaaatccaaaaataaaattcttttcttgctagcaaagtattctagtgggaaaatcagtcatggtgttaataatcagtttgtcttattaaattgtcctctctcccaccccatcgtccaaattagtagagaatttagagtcagctgaataatttcaccattaagtcatttaatacgtgtgggttttcttccagcaaaccctaaataattatgctgaattgagaaaaagatgttgtttttagctagagtgtaaaattgtcactgtagtggccagtgtgtgaaaaaaaaaaaaaaaaaagaaaaggcaattttagcttggtggctcaaacaactcagatttaagtcactgctacaaacggcttgtcacaactggttgggacactgttgcccaagtttctcaagtgattagttttgtgaaattcttccactaagtggtattttctctcttaatgcacagacaggactgtgccacatccttactgacctcaaacccaaagtaagagagaaaagaagtctaactagaaaacaacaccaggcaatcatgaggtctgcagacggcttgtggaagctgaatattccttacacttctcaaaacaaaacccatttttttaaaaaagtattcatttccagtggcctaaaatgtaaagtcttctccatggtctgactgctccctgggcctctgctatgtgctgccaatgagatgcccaaggttctctgggcttgtccacagccccagccctttggagatccttcccagtgaggctcaggttcctgcaggatttagaagtctgcagctcatgcactcagcagggcaaactgtggttgtttactcctcctgtcatcttggttcttttgtcctagtgatatcttgacttttctatggcttttatccgctagataaagaggtcttttccacctacaaacacttgtgaaatcctctcccaattatcagtatactgaatcctgccccagcatgtctgtgcagtggtgtgctggagatggcctgggctggcctgcaagagtcaattatgcacaactcttcccaactttgacatcacaggggtagcctccaatcaatcatggtggtagtatttacaccatgaacatcagaaaatgctacaaatcaaggtttcatcccccagtgtcagttactaaacatttgcaagctaacccctatgtccatctattgacaaatcacttcctcaaactcagtagctgtctccaaaaccaccctaagtgtggggaatattcagctcccataagccgtctgcagacctcatgattgcctggtgttgttttctagttagacttcttttctctattactttgggttttgaggtcagtaagaatgcagcacagttctgtctgtgcattaagacagaaaataccacttagtggaagaattacacaaaactaatcacttgagaatcttgggcaaatatgtcccaattgggtgtgacaaatctgttctaacagtgacttaaatctgtattgtttgagccaccaagctgaacttgtccactttcatttttctcaaaggcaagtttctgaaagttagacctaaatggaatgttttgaaatataaaggtattgaaattttccatagttgttagcaataatatcccccctttttaatggagtcataacagaataaatatatttatgtgtgtatgtgtgtacatgcatgggtaggtggatggatgggtggatggatgatgttaaaatagaactaaatgcgttgaagcataacctgcaatagaagatgggggagggaaatgaggatggagcttcccctctttactgtgtcctcatttcagggcccttgaagaaacatcaggttctctgagtcacagtgtaagaaacatgggcttactaagtttttaaatcacctttactgacatataattttacacaaagaaaatatcatttttataaactttttattttttatttttttatttttgagacagagtctcgctctgtcacccaggctggggtgcagtggtgtaagaaactttttattttgaaataattttagatatacagaaaagctgcaaaatagcacagagaattctcttataccattcacccagcttcccctaatgttaacatcttacataatcacagtgcaattatcaagatcacaaatttgacgtctacagacatttttaaacttcaccagttttcccaccaagctgtttgtctggtccaacccaagatcccacagtgcatttggttgttgtctctttagtagcctcctctccatgtcagatccttggtcttttcttatttttaggaccttcaaaattttgaacagcttgggccagtttaagtttgtcatctctttcctcatgattttgttgagtttatagattttcagcaggaataccacagtgacgttgtacagctgtcagcatatcatatcagtacatggtgttgatatgccttattactgatatataatgcttttgagatccatccatatagttatatgtatgtgctgtgtgtaaagaggcagtttattcctttttattaacaagaagaactccattgtatggaagtactaaagttcgttcatccattcactaattgataaacatctggattgctcctggtttgggggtattatgaataaagctgttatgaacatttatgtacaatagttagtgtctacagatttttcatttatcttgggtaaatacctgggagtgccatgtaagtataggttgaattttgtaagaaactaccaaactgttttacaacatggctttacctttcacactcccaccagcaatatctgaggttccagctgctctatgctctcacaagcacttgatattgtcagctttctttactttagtcattctagtgagtgtgtagaggtacctcattgtggcttctatttgtttccttaatgacaaataatatgaacatcttttcatcaccttcttgttcattatctttttgggtgaagtgtttgctcaaattttttgttcatttttaattggattatttcttttgtttttgtgttgtacgtattctttatacatattgaatacatgtacttcataagatacatagcttgtgcttattttctcccagtctatggcctgcattttcattttcttagcagcatctgttggagagcaaagtacttttattgttaagttttgtttggtttcgtttgatgtggctcattttatcaatcttttttctttcctagtttttcattttccttttgtgtgttctatgtaataaatcattgtgtaacccaaggtcacaaagattttctcctatattttcttctagaggactttcaagtggcaacagctcctggtatactttccttttagtttctctacctattcccttaactctaaatctagtaacagattatcttccaccagttaagtgccctgagaatcattaattacataattatttgtaataattatgagaaattttgatgcttttttatcataaatattcatacgttggcttctgtgagcacttgctactcacactcatagtttcagtgctcccaaaagcaaaccctagatgaggacttgggtgaagacaacagtgtgctcataaatatttaacaactggctctcctaaaataaataaataataaaaaccctgacatgtagcatttgcaaatttccgtggtgtaaatactcacatggcaagttttcaactactagtgttacattaactgatttacaacagtcctgaatttttaataattgtctctcatgacagttcatgagatacaagcccactccagcacagccccaggtgcaggtagtttatttgatccccaggagtgatccccaggagtcaaaagtgagggagtgagagaaatgagacggaaaaagaggaagccaacaaaggggggaattaaagagctgataacactgaggacaactggggctcgatcctgcggaagagtctcagaggaactatgtagaccacaactcaaaatcgtcccaaggagggtggagaagaccaggtcactgaggcatcaattcctactcctgtctctctgttgttgttaattgttcttgggcttttaaaacccgggcactttcagggtgctccgcacatgggctgagaaaagttctctagcactggtaggagctgcaggcagaaaagtagaaagtcacagggtgaggtgtgggtaggaagctgtcatgggtaggaaactgccagtgtatcttaagttgtccattgtcagaagtgggcagaagggtacatctgctccctgtaccagacacgttttaaacactggatcactgctattccacaacacctcccattagatccacagtcagaggtataattccctgtctggtgcaaagttgatgataaaatataaccaagaatagggaccttcggtgtccattaaataatgctttctttattggctgatgtcagtggattcaaagcccccactgaccagactctagtggcactggcattccctacaggagcatgactttcatccttctgttccattagtacattttgtattcttcgaagaaagggtaattctttgtcagtccttaaaatatatgtaagtataattaatagaatccaaacaaataatttctccatccaagccacttaataattagaatcatatgtacgtgtggatgaggaggagggttgtctcacaaactgataggcaagtcagattcaaatatttttttgtctccagactatctcactgtggtagcatcttgagctcctgtaagccgtctacattccgggagtatttccgctgacctttccttgtttggacctctgacctaatgtttctgtggttatgtagatcagagagaatcttatcatgacaaataataagatattttcttaaatgcaaaatcccagtctttcttggggcaaaaagaaattggctatggctctgtcttctccactggggaaatgtcccacagatgtggaacagatgggcctagatttagacaccatccgcttttcagttgtaattaacatcggatccaggggcagattggattttaccactgcgttggtcatccctgatgaccgctggggaatcctaaatcatgtgtttgttagaatgtgaaatctggtttgggtttctttggatgggcaaaagctcttaggagtcaaaggaagaaaaataaaccaacctcttcagcacaccactcctatgtgtctgtttctatggaagtagcccccacagatgcagtcgaagaataagcctgctgacctttcctggtgattttgtaaagaagaacatatgcaagcttccctaaatccacttctactcagttggtcccagtttttgaacaagtggattaaaataataatgacccccagcaacaataaaactatctagcacttactgaatgcttgaaacattccagctattgcgctaagaattttgcacatattatccacttttaaaacaaccatatgaggttggcactattatttttcccattttacacacaaaggaaactgaagccttagtgaggtcaaaatagctcgagtcatacagctgaaatatggacccaggctgtctgattcctggtttgtaaccacagtatcgttactaccttcactgacttatttacatctgggcagagcaagggtaaccagctagcaaatttcttccattcctgttttgtaaggtgcagaagagaactgccaaaactcaaagctaccactgtagtccagtctttttataacctcaaggaaatttatttctctcatgcttcagcatgccttaccccagtgtgcctttatatgatctcctggattcccatttgtgactctgcttcttgcttcttctgagccctggggaaggtaactggaagcatgattaaattttagctctctgctttgtagtcatggctcctaaacattggtggcagcatctgcaaactgcaagtgtaggtccttctcattaacaatgagaatatctcacattgttcctctaacagccgtagaaccaaaatgttgtctgagaacatctttctcttgagttctgattgctctctaagggcacactgggtgaacagattgcaagaaggacatactgagaccaggagtcatctgtgctgatgtccaggtaccaaggtttccctggaatacccctgaatttcaagctagcctacatcagtcagagacaaaggagcccatgtgcccaactgagctaattgtctaacaagagaggttttgaacttcctagttagaagtccatagtaatcatatggtaattattttaatgggttgtcattgaagcgtgaagttgaaagtgctgtaataagaagcttcagtatggcttcgttagctgtactaaatcttaagcaataaaaccgaaggtcagagtttaaaccccacacaagtgtgttggctttgttcatttacacacacagcctcagattgggcccctaacccactgccatccagcttgttagctctttgtacctatcatgagaacgatctggctagacaccctaggatgacctagttggcccatcaccgctaatgagaaatcatattccactccaggaacacatcctatgggattaggtcagttctggcaataggatacagtatagagaggcagttaaagaaatggtcccaacctgggaatcttactatggctttcagcagctgggtgcacaaagctagattgtagggtgaccccctgagcaccttctcagggtgccaatctacaatgggcactcaaacatcattataataaactggaaatatggtgttgcttaacttggatctccacgtgacagaagttattatacaactgaagacaaattaatccgcacaactgaagacaaaaagccatcccctctacctgaaggatctttttttcttctgctattgctagcctaaatatgcatataacatatatctcataggtgctcacattgtccccgccagctgagattttaaaattcaacagtgtgtggtagctacccaagttaaataaaatgtgttcactgtctaaatattaaatattaaaacttcaaatacacccacaagaagttgcctgcttgagaaacatacaaaagaaacttgaaagaaaataacaatgaaaggaaaatgggagatattttgcagaattgtttgcagaatattgactatgcttgtgccaggggaaatgaattagtaagaggcttatttctatacacacttttttattaatagaagattagttttctcctccctcctccacagaataaatgttgaataaatatttaaagaatataggcttgaagaggcgccagattacgagcctgctggcgtcctgtgtctcaggcctattctgtttttggaagtcctggttgcttgcccttgattggccagcagttccactgtttgatgttatctggtagcagcaatgtccatcagctcctgagtctgagtttgcagagagaacaagaaagtgacagaaaggcaagaatgcaaaaatcttgataattttaaccagtcttgtatcttttaaaagcacaatgttgggcaataaacattgctgtaactggcacgaaaattcctaccttattgtgataaccctcggaaaggctcaggttactaataagaacctttaggcaagaagtaggtttcttaccaaccttgaagtgaagagctctatcatcttgtagacagttgaatgagttttgaaatttcaaaggcctctagaaaatttaaatgatctaatatttacagtagatacctagacagaagtcattgtcctcacttctcaagtaagcctgaagaggaagatcccagtattggcaaacaggacctctagccagccagtgtttacctgggatcagaagaactcccacagggtatggcactggggtttagaggagtagtagggagggaatatcattgaaaagtgggagagggtaaaagggaagaaagaatctgatgaaccagtagaggtcacgggcattctgagcttcctctcatgttgctgaaagcaatcagggttagattcatgggttctggcttggattggagtcacacaaacaggattgaagtcccatcatcaatgccaccatcatcactatcatcatcaccaacatctttgtcatcgtgatcaccatctcctcctcatcaccattaccgtgatcaacttcatcatccttgtctccaccatcatcatatcacaatcactatcgtcaccatcatcatcaccactactgtcaaaacctcattcattatcaccatcagataaggttcatctagtggagtcagcagtgattcctgttcaagacagataacctgaacttatacatccaagtagcatggtccttcctagaatgaactttacctgttcctccagtctcatctgtttgtgctccctcatacacaatctacatactagcaacagtgaataatttgtagttttcaagataaaccacattaatttttgacaccatgcttttactcattctgttcccttgccacttccttcctaatggctaatgcctgttcatcttctcagatgttatgtaggtatcaattcttccagataatcctaccatattatcttctcactctcagctcactgcaacctttgcctcctgggttcaagcaattctcctgccttagcctcccaagtagctggtattacaggcatgcgccaccctgctggctaatttttgtgttcagtagagatggggtttcaccatgttggccaggctagtcttgaactcctgacctcaggtgatccacccaccttagtcttccaaagtgctgggattacatcgtgtgccaacacacccggcttccatcctctcattctctaagacctaggttaggtgtccctcctctgtgggtttgtggaatccagtaagtctaggtttagctttaatttcaaaggctccgcttacatatgtagaagatatattggggctccattagatccacatgaattctctttccttgtttgtgtgtctatccagcagctctgtgtgctttgctacgaatgtttcacccctacaaccttcaatgaactaccttaggctactagagccacttcaccaggaggcactgagagtgagaacgacctgggaatttgtgttctcggggggtggggggtcaaataaccaatgattgattggtatagtagtaggaaagtccagctgctttgcctcaagttctgtggtgcaatccacattctgtgcaggtgaggctaaggctgaggtgtcacctggcatcacacccctcattggctgctgcttcttccttgtcttgcctttgccactaccttattggtcccccattgcatatggactcttatctgagggtctacttctgagcaacccaaccaagacctcggagcctttttccttgtattgattcctatcacctgagagccaatttccctctcacactaaatggcacctttaaatgaatgaatgaatgggatggtgaccagacaggtagggaattctgcatcttcagtgcctggagtctactgagagtggaggctgtatgattcagatcaggggctttgaagtcatgtggcactaaatttggatgaatgctgactctgtaaatcgggcatctttcttatttcctccaaacataagtttactcatctgtgaatcagagattcagcaggcccaacttctgtatgttggttattgggaaagtgaaatgagctaatgcatatcaagcactgagcccagggcttggcccactgaaagctcattcattcattcattcgtttattcattcaaattccagaaggagtaccaggtactgctctggaactaaggatacaaaagtaaactaaactgtcccaagatcattcaagcaacaaccgggaagccagtgtgcctggcacagaggcagcagcaagggagaaggatctgagaacagagtggctacttagtgtccattactcaaaatcaagagattgtatctagaagcccagctttgcagcttttcttaaagaatcagaagctttgaccacactaagcacgtattctcctgcaacaactggctgagtcaaagatggtcctccactgtccagtgagcagtgggccctacctcattcatttctacattcccacaccctgctgtttcctgtgggcagttgaggtcatggcccaggcagcagcctctgacaacaccagggactcccacacttctcattgctcactgcctccaccctgtgcctgtcattctttccctcaaccacagaatggggataaagaacctcaatcatctatgcctgttcttgtacgaaccaaatgaagacttctactgggtaatactttgaaaaggaaggaaactcatatagatgtaggaggaattaacattccttattctacaagagaggcccttccttggaaaataattaatggactcaaaccaggaaggtatcttcctctagaatcatgcttcacagagtgtgtgtgtgcttgccaggggaaagttgccaggaaaaccaggaaacatttctgcttctccatcatgcttggcagcagggcttcaggaggatggcagtgagaggggatttcactttttcaaaaatgaacttttttaaagacataataacacagccaacaagcgcatgaaaaatgctcaacatcactactcattagagaaatgcaaattcaaaccacaagtagatgccatctcacaccagatagaatggctattattaaaaagtcaaaaaataatagttgctgacaaggttgaggagaaaagagaatgcttatacattgctgctgggaatgtaaattagttcagccactgtggaaagccatttggaggtttgtcaagaacttaaaatagaacttatcattcgacctagcaatcctattactgggtatatacccaatatatagaatagttcacaagtggtccaaaagaatataaatcgttctaccataaagacattgcaggcagcactattcacaaaagcaaagacatggaatcaacttaaatgtccatcaacagtagactggattttttaaaatgtggtacatatacacgatggaattctacacagccataaaaaagaatgaggtcatgtcctttgtagcaacatagatggagctggagcaaattaataaacagaaagtcaaatactgcatattctcacttacaagtgggagttaaacactgagtacacatggacacaaagctgggaacaacagacactgggacctacttgagggtaggggtgggaggaaggtgaggattgaaaaactacctatcaggtactatgcttattatcttggtgactaaatggtctgtacaccaaactcccacaacattcagtttacccatgtaacaagcctgcacatctatccctgaaacctaaaagttcaaaagaaaaaataaactttctaaccaaatccaaaaccatgtctcagtcaccatctcttggcagcagaaaaatagatatattgaccatcacacacacattagagtggctgaaaaaataaattggaatacatcaaaaattaaaacttttgtccatcaaaggacacaatcaatagagtgaaaaggcaactcacagaatgggagaaaatatttgcaaatcgtatatctgataaggggttaatatccagaatatataaagagcccttacaagccaacaaccaaaaaacaaacagcttgatttcaaaatgggcgaaggacttgaatagacttttctgcaaaaaaatgatatataaatagccaataaacatatacaaagatgctcaaaatcagtaatcattaggaaaatgcaaattaaaaccacagtaagataccacttcacacctattaggatgactactatcaaaatatcagaaaatagctggtgttggcaaggatgtggagaaattggaacccatttacactatagttaggaatgcaaaatggtgcagctgctgtggaaaatagtatggcagtttctcaaatgatttaaaacagaattacatgtgaaccatcaattccacttctgggtttatacccataagaattgaaatcggggactcaaagaatattgcatcattcacaacagctaaaaggtggaaacagactgtccgtagacagataaatggataagcacatttggtatagacatataatagaatattattcagccttataaaggagggaaattctaacacatgctgcaacagggatgaaccttgaatatattatgctaagtgaaataagcctgtcccaaaagaggaaatatcatatgattttacttgtatgaagtacctagcacagtcaaattcatagaaaggagaatgatggttaccagagactaaggagaagggaaaatggggagttattgtttaataaggacagagtttcaatctgggaaaatgagaaaagctctgaagatggatggcgatgatggtttcatggcatgaatgcaccactgaactgtagattttaaaattattaaaatggtaaattatgttatgcctattttaccacaataaaaatagtttaaaacatttaatccaaactaatagatatgtgggaatatatacaatatttgtatatgttgatacatccaatatatactgtgtatatatgaacagtgactaaaatagagggagagatagatacagagagacttttttaatgatgcagcccctctcggagttattggcccttccagttccccaactaggtttgctttcctctatcttacttaagaaaacgaatacataagctgacttagaaatggaaatggttcacaaaccccaggaagcagtccagctcaggaacccaagaaagagtgggtcagggaacccttgtgggaggtcagacctgtccagcgtaatgggcctgcccttccctggccagcccccagcacttctgggaggcacaaatccacaggggatgtaagatgccatatcagtgttcttctgcttcctcctcttaacccactacttgtatttttatgtttcctgtgtcctgatgctttgcacgtacttgttttgtacaatgattttatcatgtatgtacttattgagggccttagtacatcggcagtgagggcaaggaagtgataaaggcctggtgtcttcatgttgagttagacttaaggacttgttcatgtccctttcctcatccttccactcctgtggccctcctgtcccacttgtgcctcccatttcctttccatcctttcccaagcttcctgggaggttattctctgctccaacccctctcccattctccattcttctctgccctgctctggacagggagatcagcctctaacgaccttagccccagggctcccacacctctagctttcacctcaactgatgggaagctgtgacaggagaggggagggcaggaggagtgagaggcccagacacttcttttttgctccctcctggctctccagggtctggcggcagctgcttccctccactcctgtgatcatctacatgctcttaacccccttccccacacttaccaggctgcagcaactccgtgtcctcttgcaccttcaggccaaaggttcccgttgttattaggctctgggggtctccaccatctttgctggttcccctaaccctgactgcactgctgcaaataagtccttcattaaattctcttcagttagaaaagagttctctttggtcaaacccttttgagttggcttctgctttctgcccagaccctgacaggtacattagacctccccactattctggatgtatttatctgttctcacactgctgtaaagacctacctgtcactgggaaatttattaagaaagggggtttaattggctcacagttctgtgagttgtacaagcttctgcttctggggagacctcaggaaacttacaatcatggcagaaggtgaaggggaagcaggcacatcttcacatggccaggaggagagagagcagggggaagtgctacacactttttaacaagcagatcttgggagaactctatcagaagaatagcatcggagatgtctgcccctatgattaaatcacctcccaccaggcccctcctccaacactcaggatcacacttcaacatgagatctgggtggggacacagagccaaaccatatcactgaccccttctcaaggagttttatggaagcagaccaggaaatgtacaagaatacccccctgtgtgttcccatgcagcacctggtactggttagaaatggagatccctgggccccaacccagattgctaaatagatcttctggagtgatgctagggacccccattttatctgcattttctggtgactctgggatacataaagtgatatagtaacataggatactttgttaatacattggatagaaggtctagcgttaggtctcatagctacttatttttgaagtaatgatgaacacaaatgatagtttgaggtctgtgaaacatgagtaatatgatatgaaagatctgtgacttctgctggggacatattcccaggttttgccagtattactgtggcatattgcctgtattcatagtggaaggaagtgctgaattccaattagaggttagtgagaacaaggatgtaatttgtttgcatccttagcaaactcacgaattctttttgagtgctctttggaggatagaggggcttatggaccccaggataagagcctcagtcttaagagaggtctccatagaaggggatttgaggcctggtagaggttagagctgtagacgttcctcaagtagaaagcaggcttgtcctcttcctggaatgctgtgtggtgtggtgtggtgtggtggtcaggatttgaacccagtgggtcacctgggttcaaatcctgcctctatcacttacaagtcatgtggcctgagctgctggacttctctgtgccccaggttcccacctgtgaggctggatgaggtccattgtcccctactgcaggtggggaggtaaatggagaaggtgtgtactggaatctcagtatagccctgtagggagcacatcagcatcagcccagctgcacaaaccttgttcccagagccttcattcagagggtttcaaggggaatcagcaatgatcacctgagaaactgacaaccaaaagaaataaatgacttcctcagtaacacaggagtcaatatctcagcaagtggatattgtgaaaaaggcatcttcaaggaggaagagggagagagaggagaaaaagaaggagaacaaaggggggaaagtagaataatcttttcctgctgaaaaatttctccagagatggcaaatctctcattcccaaggctccaaaacagggaccccagtatggtgaccttcaagaacactaaatggtcaaggacacatctgggcacctttaaactcctttaaagtaaaatcattcaaggatttatgttaatggtgcaggtacattcacatatgctcgtttcccttggaatctgagcccctgcaagaaaactatttcagctggtaatggctcccaaagactttcccaatgccaaatgactaaataaccatagggtgggactcaggagaggctcccatgtaccttaggaaggcagttgtttctgagagtggcccattttgatttaaaattgtatttcattcccttcacaatcttccttaactcactcccctcttgttttaatgtgggctctctcagaagcagaccttgagacaaggatttaaatgtaagtgatattggagaagaggaagaaaacatcagtaggggaatagaaagtgagacaggaaagtcaaagctactaataaaaggtacatgacctgagccaggtgcagtggctcacacctgtaatcccagcaactcagaaggctgagaggggaggatcgcttgagtccaggaattcaacaccagccttggcaacatagggaggagccccctccccctctaaaaatgttacgtaaaaaaactagcaaggcacagtgggcatgcctgtagccctagctactcaggtggctgaagtgggaggatcccttgagctgagaagtttgaggctacagtgagttatgatcatgccactgaactccagtctgggcaacagagcatgaccccatctctaaaagaagaaaaaaagaaaaaaacaggtccataaccaagccagcaatgcaacataatattctgggcacctgaagcttaattcagctgggaaactctggagacagcctagagttagcccactcaggggtactgatatgccaactctcaacatttgagggctcccatgggtgttaattttcaagcatttcttgacttctttgtgtggtaaaatcaaaagccttcaaagaaattgaggcattcgctggtatttgaaagtcaacggagctctctaaattaataaggcctgaagaatatagtgaagggaaggggcaccagcagccttctgctacattcctcttccctgcaaacccccaccccaaatcctcttgttcagaacctggactgtgagactgatcatttctctctagtgactagaatcaatgaatggttccagaacaatgatattcacactggtagcagcaccctacagcagacccatggtcagttccaccttgtcctcatggggctattagatacagagcctgtgatcagggaaaataaatttaaaaaaaaacttttatattccaagcttaattatatgtgatcacttgaaactatgaaaaagaggaggaaaaggaagattttattattattattccagccgtgttccctgggaggtttaagatttagaacaatttccaccaaggccacagttctgtagcacttccctaagaattgcttctccacaacaccttcactgaaattaaagacagagagacaggagtgcagatgatgtagtaaaaagaaattgtctgtgaaaaccgctgactgtcgatgcaacataaaacagcagggttaacgtcctgccattcaaatacatttgccctcagtattcagaagcccttatgtggatcaacattccagctagagcctgctcacctctaatatgtcatgggccatgatgatttcctgttatcttaggtgtttttccatttaaccactgtagacaaagttctttagttttattagtctcaatcaacctttgaaattacctgatgagatagtaattatttctcagaatcctgggtcaatagccacttcctcaatcttctccttgcactacctctacccagcacagtatcttctgtggctcacatcagttagggaagcacatggcttcaagtacagagcccccagctaatggtgagtgaagcaagtaaggaagtcctttcctcacatagttagaaatacagaaggagctgatttcaggaattagtccagatggtgcatggtgtcctcagggccctgctgccctcagcatgttggtgtgtatcctcaggcttattatctcatagtcataaatggctgctgccattccagacatcacatccaagttgcacgccggaagatagggtgactttagctggatttgtgctttcttctcattggccaaaactgtgtcacatggccatgactagatccaagaaggccagaagagttgagcatattattacttagaacaagattgaagttgtgtttgcaaaataaaaggtttaatgactaatgaataggccaccaacagcatctgccacattacagaactctgtcctaagatctccacactgagttaaggtgaacctcttacgttgggtacttccaactggacctcaggccattcttctttgttgaaggacagtaacttattaagtcttagacccttcccaccaagcagcgcatctggctttgagttggtgctgcacacattattgttgaattaataaataaataactcttcaaatcctaaggcaggcgtgtctcagaatagaatcatcattttccttggtggcctctgaatagtgcatgctttaaacatataaatgtgatttcagctgagtggagctatccctggaagtttactttgtcatttagtttgttaggaatgtttcaagtctgcttcttggaagttactcgttattgttttttcactgtggctctttttattatctgggctgtatctgttacctgtacatcaaaggacactatcaacatactgactgccacaataatgctgcataacaaatggcctcacaacttcagtgacatacaataaacaattcattggttcatgggtttttctggttcagctgaactgttgaacttgaactgggctgggcctgtctcagttgggctcacccacatctaggggttagctgcttgccagctaatctctgacagccttagccaggacaactgaggtgacctgtctgtaccctgcatgtctcttttcctccagcaggctagcttgggcatgttctcatggcatcattattgttgccacaacaatggcagtgcatgaggggctgcgctatgtctaagctcctttgctcattgcttttcatttacttctcacaacagccttgtaagcactagggagcatgctgtgacgaggcccatgttgaagggtaagcaaagtaagaagagtcacacaaagtcacacagcttggaagtgtcaagtctaggacctgatgggagatcccataccatgccctgggcttcctccaaggctccaggctttgttgcttttagcagctgcttgtgccctgtccctgctacttgggcatttcccttgctagattacaccaggccagctgcggtggctcacagctgcaatcccagcactttgggaggcccaagtgggtagatcacttgagctcaggagtttgagaccagcctgggcaacatggtgaaactctgactctaaaaaaaatacaaaaaaaaatgaagggcgtggtggcacacatctgtagtcccagctactcaggcagctaaggtaggaggatttcttgagtctggtggaacaaagctgcagtgaactatgagtgcactgcatcactatactccagcctgggtgacagagtgagacactctcaaaaaaaaaaaaaaaaaaaaaaaggcaacaccagctactccacgaacaccaccctccttgggatccatcacttcatatatagagagcccatgcttgggaggggtggatattaatatgtgaggacacagctgctgccctcaatagaagggaggccagatacatgaacataaagcaaaagggaggccagagacatgaacataaaacacggctcatggtccaggctacacatgatcaaggccaaagcagattcccactcagagggttctaaaaagttccctgggaagagaagccttgtgatcatgagactaaagctgaaattccaaaagaccacccatcttctctaaatgcctatcattcatcgtttccagaaggcactccacattcacttgtaccggctgctgtagccaagccatgggcttggattccagggtgagttacagcatatctgggctgcctcagggtgttgggccagcccaagcattttcaggagttcaaacctgtctcatattttgtagtgcatctggtaaaaataataatattgataaagaacttcaacggctctgacaggcagccccaaaaagtggatggctggaattctaaaaatatccctcactgtctgcagttggagaagacagctcactagtagatgagctgaacatcagaaaaagtggagatggggtggtgaaccagaaatgatctttatacagggagatagctgggctctgtgggaaggcttggagggagtcctggggtcaaatttaagccctgccatttgctagccatgtgtacttgggtaagttcccacaccctctgcattgtctgggaaatgggaccagtaactccctgcctcatataatatttagaagaactgaggaagtccaggtaatatacctggagcatgcctggaattcctgtctcaacaaacagtggcaaatgtgattattattattattgtcaatgatattaatatatcctttgaaaacataagaatggtcaaagtaacctaaagatgccttactctattaaaactatttgtgctagttgtattaatagtaccatcaatgtcacactcccagtaggttttctgcatcctaaaatttgactttgaacctttgttttcttcctttgttctctttgcttgtgctgcaggaacctgttttccagtgagtaacatgagagagacttagagcagagtgttttgtagccagagtggcaggcccaccgtcaggtgccaggaagggctctgcagctggagaagggctcatcacctcgcaggcctctctgggtgcccagaggtgctatgtcaaagggtatctggttaacagtgagcatccccgcctcatgctgcccagctcacgagaactaacacagcttttgatagtcattaccctcaaaagtcctgagtgcttggcagatctcatttctcatccccctcgaagcgtggatacaacagtgtgttagatggagcttcttgccacaaaaccagatcaatatgtaatactggaacatattcttggtgagatggtttatggacttctaggcagtgttggctgtttcagtgagttgaatatgtcagctatggaacagcttatttagatcttgattaatctacaaatgtgcaattctgtatcccaattacctaatgtgagtgtcctttcaaagctaatcctaaaacctgcatatcattggatcagccaagtcatacagcaaaagagggtttgagtccattgcaatttgggaatgtattttctgatttattcccaggctacaaagtacagcaagaattattcttaattgacattttctttttatttttttgagacagagtctcactctgtcgccgaggctggagtgcagtggcgcgatctcggctcatggcaagctccccctcccaggttcatgccattctcctgcctcagcctcctgagtagccgggagtacaggagcccaccaccacgcgcagctaatttttttgtatttttagtagagatggggtttcaccatgttagccaggatggtctcaatctcatgaccttgtgatctgcccgcctcggcctcccaaagtgctgggattacaggcatgagccaccgtgcccgttaatcgacatttttaataaaaagcccattggcaaataattttgtacagattatgaatagatctatcaatgagttatttttgagatttttttccatgccaagcatcccaggctcctcagaaattagtgaagtataagacagaattcttacctctaaaatctcccatcacctacaaaagttacacaagaaatactatttcagagtgaaaatattacaaaatatagttatggattataaaatacagatagagtcacaccaactgagagagaaatgtagccactattttgattaatggccttacaaactcttatatgcaaatatataatatgtgtatatacacatatacatagattatttaataaaaaaagacattgtaatgctgtttttcatttagcaatgtattatgaatgcctttccttatcacttcatattggatttacacaatcccttttaagggcgtcttattgaatgatgaaccacagtttatataacccattccccaaggtatattttgctaggtttgataacttattgtagtcagcaattttggaatgaaaatactagtgcatatgtctttatgcatttgtctgatatttccacaggatctagtgttaaagtatactttagaatcttacgatcttatggaagagaccaaacatatatgtgaaaagcaaacaagctcatacaaagcagggaccctggggctacgttagtgcaactgctaagggtcaaaggcaacagagatcatttcatgcttgggttgccacagaggcttcatgaaggacagttgcaagtgacagaaacttaaaactgcttaagtgtaaaaggcctattattggctcatgaaattagaaagtgattttgattttagactggagccggggccaggggtcacatggtgtcatttgggacgtgtgtgtgtgtgtgtgcatacatgcttgcgtgtgtgtgcctgtgggtgtacttttcgtgtatgcatgcgtgtgtgtgtgcatgtgtgtgtgtgcgtgtgcctgtcccatctcttgggtcggcttctcactgtgggagcagcattcttctcaggcaagttttctctatatgacagctgcctctagcagctccagatgtggggtgtttatatccataaaaagagggtgtctctgcctcagcttctccacttatctctgcttggccccttacagacctgtccctgactctccactgtgtgacagggcatggatgttctatggctatactgggtcatgtgtgtgcgccctgtgtgaggaggaggggatgtacgactcccatcctgaggagcacttctcaaaaggaaaagatactgggaggtcaataaatgaatgcaatgtcactgctgagggtgctagaacttgaaccacacctattagatgctttgagaagcaagtaacagagacattctaaatcaaactggcctcaacaatgctcatggtatgttatgaagtcaagaggcagggtggacacctgatcaagggctcagtgatgttatccgggggcttaggttttttctgattcagggtcaacttcctctcaagtcagattccttcaatatgactgtcagtggcaatgagggctcccagcttcctggtccacagcaagcaacagagggtgagaaatggctccctttggcaaaaagtaaaagcctttcctgctctctaattgggccaacctaggtcatgtgctcacctctgaaacaatggccacagctaaggaatactacatactgattgaccaatcagcatccactcctggagaaaaggatagggtcaccttccacatggggcatggtggatatttggacaaaactggggtctccttaggaaagagtgggagaaggatgttgagtggtcagtcaacactgaaatcctagtaagatttcattagttggagaggaaacatgcggttggatacagtggagaggcaatttctggccagaaggtagaattccagggaataccctggtcatagctgaccaagatgcagaagcaagtttgcaaagctttcctgcagggatccagtgagtaaacaggttcagttggaagtgttcatttatttattccctcattccacatacctttatggagtacctactatataccaggccctgtgctgactgctgcggatatggcaatcattatatgaaattaattatatgacatcatatcctcatgaacttctggtggaggagacagacaatagatgaattaatttaacatataatgtatcaggaaaaaccaaagagataaatgacatagagagaaatgggagcgggggaaagaggttgccatttgagcagggacctgaagggtgtgatggcgtgagccagtgggatatcttggggcagagtgttcagggcagagggaagaacaagtgcaaaggccctgagacaggaatccatgacatgtttcatggaaagggaagtgggcaaaaggagagtgacaggtgataacatcagagagaaagctgggaccaggtcacaggagagtgttgtgggcattggaaagacttggtatttaaggtgttgaattcatgatgacagaagacattatcaaagcagaaggtggctggacgttcatcttcctggctctgcctcactctaactttaaccccttttatctcctctcttccaggccatatacatgttctatgcgctggccattgtgtgtgatgacttcttcgtcccttccttggaaaagatctgtgaggtacgtgcctcacattcttggtatgtgtgagccagactggggactggacctgtgccctgtactgttccagcctcctcaccaaagtcctggggagccctcgcagggcagctgcagcgggaacaccaggcatcaccatgtttgagagcaatgggcaatattagcacaaaagtgtcatcggtctactgagcatttcatgactctgatcaataatcagacgaaaacccacaggaccaacctccccaactccatttagacctaactaatggtactatttgtgttttccttccccattttcttttccttttaaactcactcttcctttctgttacttcctccacctctctctcctgtgtttccttctgcctccataactctcctttgatatccatggcatcctcgcaggattaaaaacctccaaccgcatacctctgccatgcttcctctctctgtatatgtacagaaatgctccaagcggaagcactgagatgaaagaattggccacggagatcaggaaagtgtccctgttagaaatcatcatagtgcatgccaggctgaacagcaagttaaacccctttcatcaaaaaatattcagcagatctagaactctttcattctcttgcctctttcatctctgtctgtttggaaatgtagcttcctttatctgaaagctttccattttatttatttatttatatttatcggtttatattttaattcagaatccctgtttccagaaggcatctcccccagacacatctgtcgagaactcggtttctttatgccagtagttctcaaaactggttgtgtcttccctttccttctctctcccctgagtacctgatccagtaggtcttgggagagtgggagggggtagaatttgcatttctaatacgtttttcaggtgatgctgaggctgctgcctagtccaggaaccacagacttagagaaccacataccctaagcagtgtcttctacatcctggaagttagtgttggatacttaaataaataaaaagtgtcccacaataacaatatttagagagccacaggaggtgttctcttccacagtagcacagagtaattgaggtggcatctgaaatgcacagtgggcaggtgtggaagccctttgtctgaggaattccacctgagagtggggtcaccttatgtcgaaggggaggaggtgttcctcacctgtaactggagtcctctgtgatctctgaaataccactattgggtgttttattattcatgcagagcaaaacaactctctctctttcccatgcaatttttttggtgtgaatatcaaaattatattctggaaatgtcagtacagttgtcagcatgtgttctactcagttgaggacacagaacctgtgaatacccatgcccttgtagggagaggcaatcaaagagccagaaaatggcaggaaaagagggcaggtgtgagtcttttaacaaaaaagttataaggagaggaaaaggaaagaaaatgtttaaggagggtgaggtgttattttactaggtccctgatatggttcagtcgctaaacagtgtggtgtgactatgtctacctgtctttaatcatctcaagaattctgccaggtgactgatattatcccctctttacaaacaaggaaaccagagcttagagaagctgagcaacttgccctgggtcaagggatagagtcactatttgagcccaagtcagcctgatttccaagtcttcaggcttttctctactccatccagagacgagcctggaccaggtcatggtggtgttagaactggctgcactgcccagacccacagcgatactggaggagtgggcacagaagagcaaccacattttcctgggctctccctgctcccaccccaaatctggtcttataagcaagattcatataacaagagtgggtgccccgtgcctgtctcctggaaagacaatgttggctccatggaccttaaacaaccttaattgctggggaaacattatgtctgtgaatgatgggtgggctgaggtcagagctcacatatatttagagatcctgacatgtttacatcttctaagagacgtggaatcagttctccctggagttacactttctcacaagatgagaggatcatgacgtgggtccaccagcagtggcctggagggcctctcggccctggattctgtttactgcctgtgctttccttaatcaccttttaatgattcgatactctgtgtttcatggttactcgtagactaaaactgggagtggggcagaaaaacacagaaggttgtcgtttccagcttttgtgaaagatgagtggggagagaaatccacactgtgcaacgaatcattgcttggaggtcagggcagattctcgctcagtctcaaatactttaaagttaaaagcagaaaaatgtggggttcaggaaaaggcaaagaaaagaaaatgggagaaagagaaggagataaaggcaatgatccaggatccgaaactggggtcaggcaggccctggtgcttacaaagcacctgctccatgccagccccttcccctgtctggaccttactttctccttgtgtgaaatgacagcccctagattttgaacagtccagagataccattgcagaacgtgcagagagggtctccagagtttagagaaatcctataagccacagtagacagcctcagctgcactgaggcgggaagggagagaggcatttcaggaagaagagtgaacatgaaccaaagcgcagcgagtggaagggcctggcatccccaaggaccatgaggtggcaggcctggccgagcagaggcttgtctaggaaaggtgaagtcggatggggagggtgggaggctttgggacccatgtggaggcttccaggacagcagtgggacatttgagcagcggaggatgtgacaataggtctggaacactactcacccctctgacgtcagcactaagctgggctctgcctggaccaagctctatgccaggggctgggaggaaactagatcacacacagcatgtcccatcccatcccagggctcctagctgcagagcagctccagggtaatatccacagggggctggaggaagtggcggggaattggcaagtgcagaagtgcagagagagagtgggggaaggagagattgacgctgcgagggacagagttgggaggagatcaggaaagggcttgtgcaaggggcaggattagaacagcccttagagggaaggtgtcagtggccaagtattttgaggaagggtatttggtgagagaatgtgtgagccgcaaaaccaagatggggttttgcaccagcatacagggagccctgcaagccaggctgggcgttaggaattattccaagctctggagggagctggggagggcttttcagggctctgtcatggtagataggagtccagagtcaagaagactagagtcctgtgagatattgccagggctgaagtgaactggggatgatggaggggtataagaagatacagaggaagaaacaaactggctggatgaaggagagaggggaaacggacatgaacccaaggtttggatgccacaactaataccccagcaggacagaaccacagcaacacatggctcccgcctcctggcaggtctcggcaaaccatacagggagctgcgagctgtgtcaggctacctcactcacagactcttagctccatgggacaggagtgcttgggcacccctcacagccacaccttgcaactttgcgctatctgcgcctccatcttaggatctgctcggcatcccatgtgaagcttcgctgtccagccgacagcgaagcgacccaggatcctagatcaaaatcctcagttagggcttctcctgcagactattgtgggtcactcaatggaggccagtgacctacatcagggccacaccgcccctctctggctgagcaaggaagtgcagctgtaggtgccactgggaagagaaggatgtcactcaagcttgactgccaggagggaactggctattcactggcagccagcagcatactttctgggtcatgactgaatgcagaaatgcaaaatctggttaccagcctctaatgtataattgccttgtcttcttgtaaatcaccttttggtttaacaaacagagtaacctggagagctcattgtataaaccccgtcttggcagggctgatgcctcattaccttcttttcagccttaagcccccactcccactctctgatcccggggtttccagaatgcctcaaggaaggggagtgggtttcaggagggtgatccccacatccacaccccaacatgcctccataacctcctaaagactcacaaactggttaccatgagcgtcatttagcctgagatcagcatagtatcacaaaaatcaggaagttttgcataaaaggttggattattggcatctcttaaaaatcagaatatctggccacactgagggaactgggcaatgctgcccatagaaagaggtgaatgcccccaccatagcctcagacctaccgcctgctgtggcctcccatgggcccactccactcctgactgtcatctgcacagcccctgcgggaattgggttgaagacccctagatcttcccaagagcctttagctcataaggacatgtagttccctccccaaacctgtcccttaaggaggacattgagaggagctctgactcagcaggggatcggcagcagtggctgcgctctgtgagaaggagaaggaggctgagagggactaagtaccagccccaggtcccatcggtcctactctcgctgaagccccagtctttgcttctcagggcttggactctcgggtgtcacagtcacctctcttccgagatggaatcccaactcacctgtgctttgtctttgctcctctgtagcgcctgcacctcagtgaagatgtggctggggccacattcatggcagcgggaagttcggccccagagctgttcacatcggtcataggtaggtgacagactgagggacatctcagaccttcactgtctgaaggaaaagggctctgggaatggatggcccccagaccgagattgtctgccactcatagaaaatgataatccagggaccccaatgagtagaacatcagcctcccatctgccgttgttgttttatttaagtgatgcttttactgtgcatgaacttgtcccagaccccaagcccatcacactcctgtgcagctatcatccctctgtagattagaaagctctctccacccctcagctgtttcctgtagattctgagaacaatctaatgcttatgaaaggttccccatgcccaccttggaatgcaacagggccacaacagccaggctgatgtgggatctgtgtttcaggggtcttcatcaccaaaggcgatgtgggagttggcaccatcgtgggctcagcggtattcaacatcctgtgcatcattggtgtctgtgggctctttgctgggcaggtaagactggcggcttctttgtgatggcaaaatgtgacattggggaaaggggaggcatggagtttaggcaggagactgtcttgctggaacacaacttgcattagggcccagtggtttgggcagcagtgatttgggacctcacatcccaggaggctggcccagctagaagtggaaactggtaatccaccattacttggtctccatgttgatggaatatagaatgctcaggtccacataaataattaaccagactgaaagatgtgggttacaatctgaagggttccacattcattttggtatgttactgatctgaactagaatggcctaaaacaattttaggtatgatttttgctcattggaaatagaatacatgagaatctgctaaacacaatgagaatacatgagaatctgctaaacaaaacatgcagtcatcacggtttaggacacagcctaaccttttttgactgtggtagagcatttcatttctctattataacgtgcctttggggttatgaagggcttagcaagcctgcagtttacctatggagttgatgccacttccaggtggtgtcctgctatctgagttctttatgaatactggcgtctgttttggaaagtctggggaaggtgctcagaagccactgcgtgggaggctctgggcgacaagcctacactgcagcagcacctggaggtttgtttgcagggtttgcaactgttttgccaactctgatatcctaaatttcttcatagggattttattcagaaacaacacaaccctgagatctctgcccaaatacccacaactttgtgtatcttctagtaaaaggcacttctaaaagctcatggaggctactccacttacaatatcaaggaacctgctgatcctaaccacttgatcagcagccttgatatgaacagtgcactgttctcctagaagtggctgattgggtcagggggctaaggaaagccccggggcagccttccccctaccctttgccagggccctcaccccacagcagcggcaaggggcaccccatgctgcccgttccactgatgtagactcgagggtctccatgcaggataccccgggtccaccattgcattctccactgcccatttttacttccgtcatcttcgtgcctattgatttgtctggattgcctggtgtgtcagttgccttcaggtgacacgcagagggacacctggatctcatcgggattcagctccagggcccacaggtggatgggtcccttctatctggaaaaggggctcccagtacatggtgactgagctctgctcagctccttagactgaatgatttccctcttctcatcctctcagtcaatgagctcatgtcttagattttgtgtacccacaatatgtgctttttaaatctcccataaatgtagttagtatttttttaaaaaatgagtctctgcctttgcctttggtgctatttgcacttccctggctctcctttgccttggacacctgcttgtggccttccacagatgaacagttgcacccagcagaagagtctgtcgctgttagcactctcctaattggcattgtcaccatcagcagtatggttattagtctggctgttattagtgttgtcattagttcattcatcatttgtacctgaagcttgattcacaagcaagcccaaaggaagagagataatgtagagaaatgaaacaaatgactggggagcatctagtcagtgccacacaactaattacttatgaaatggcttggatgcatgtgtggctcatcactcattagtaacgcggttcatcccagcttggttggaacacctgcatcaaaggcaaagggctccctgaactccaaaaaatgctggtgtctgtcccttgactcaccccagaaggtctttgctggctcacctcacaaccctgtagccatggacagaagtaacaaccatgactgttgggagaagcagtccacagtccacgcgatgactctggatgccaacctttccttctgactttcctgtcatgtgccaaactggagattttcaaggccatccagctcagggttttgtaggatccttcaagtctttgcagaggaagcaaaattatgttttgggaagaacatgggctggggaatcagacgggtctgggtttaaatcctgattctgccattttctggctgtggaaccctggagaagttacttatgttctcaaagcctcatttttctcatctatagagtgggtacaagcacacctacttcctagtgttgccatcaagatgaattgtagcatgttcagcattaatagacctgctctacatggtaagtcagtctcagttagacaccattagctatgctcagaatacgcatccctggggttctcacctccaaattccacctaggtcactgtgataatttgaccaactcattgatggaacttatctaacagtcaagggtgtccacagcttaattaacagacacaggatactcagtgggaaggaaagggatagtcagggagaaggtcttctaaatgtaaatcaaagtaaggagatgttcgtagaaaaacagtctcaaaggactagtacttacttctgtgctgtctaccagtgggaggtgaaaaaaaagaaatgacagcttcccagcctcaaacagggagaagctctcccaggcggtggagttggtgcagtggaatgttacggcaaaggctggatattgggaattgaagcgattaataaatccaatcatggatttcacttagcattttatttatgttgatctgcactttcatttggctgggagaattaccagcgagtgcccgtgggcctccctctatgaatttcagcatggagggttgcacatgaccaagtctgttatccatctgaaattaaagtaattaagctataaggtttgagttcctgtctcaattagggttttgatgaattcagtgtaattaaatgtctgctgtatttgcagtttgcaaacataaccctcgctttggtgttcacctaaggtgctttggggagttttatgggacaaaaaggaaattgctttttagaaagtggcttatagagaggttcttggcatcacttcaagacatttacaaggctgtggtcctacaagtttcctttatttaaaaacgaagaataataacaacaaagagaaaacaccgagctcttgatgcaacatactaatgtatcttgtacgttgtattgaagggacttcatgccagttttgtaaaacaatgtacttgtgaatttcgatctgccgttcagagcatgttaagatttaaatgcctaaccacaaacagaaattatgcagtttaactgcatcccaggttaggactttcatattcaggttattacaggccggcagatggctctagtttataataaagagctccaacatcagccctactggcatgcttaaaatgtgcctgatgttctttggcaaggcccatctcatcttggctgggtttgcctttcttcaaataatactggctcgtttaaacaaaccctagcagcacccaaagattgcacctctgaattgaaatccacctgcatttgggcttccccaagagactctaagcaaggactcaagtgcaaacagttgatttgaaaggtgatcccaggaagtgcttgtgggacagtgtggaaggaaggcaaggaagagaaagcagtggaggaaagtgtgttagcaagccagttatcactgtgggtaacagagatctaattcttctgtgggaactgggagacagtttaactggagagccactaagttatctcatgtaaggaggcgggggagctagagtatttctccaccagcttccatcattcattggttaaagactgcacttaagggatattaattccccagcattccagcttgctgggctcaggcggagtggaccttggggcccagggaaaacccccaggcaaagagatctaggggacagcagtggaaagggcctgaaatggtaaaggtggggaaatatgagtgagctcatagtaaaacatttgctatgaactcaagacaaagactttaaaacaatacacttcctgggtctcatcttcagctcccttggatgaaacacaagctttagtactaggcagactataaagtgtctagggccaggacatcttgcatttaaagaattttctctaatgttaaaaataccagctactgtttattaagcttctctaacgttcaggcaccacactagattctgtaaaaatatttgcggaaatacacccactgagttttaagatagttatcatccttctttacaggcaaggaaatggatactgggggattcagtattccccagatggcaaagagtctattgtctggtagttaagactgaatttgagctcacatcagttggttataaattccattctccttccaaaagggggaatctacgatttaaaaacctccagatgttatcattgcattcttatgattagccttggattttatgtgttctttggaagttttgagtgtaggatctggggtcaatgccaagaaaacagacacatcagcaaaatggtggtagcccctgctacaatggaagtattagataggtgcaaaagtaattgcggtttttgccattgaaagtaatggcaaaaaccgcaattacttttgcaccaacctaatattttacttagcacaaacaatgtgcagctagaagtttctcttatactcagatggcatctcccacagctgggcttttgcttccaccacagatggaggactcaggctgataaacacagcgggacacccacaggctgccccagcttaccccgtacaccttgatttctatcttattgttccccagacaaaacccaacacacagctcccctgttccaatcctgagatgcatccagattttccaagaagctggggacagaggacaggggaggccaaaaaccacacacccatagtgctgccaaacctaaaaataggggctggaggcctaacatccattccagggagggagatgaaattgcaaggaagagagcaagtgatctgttgagaaaccaagagggcaggtgtggcagaaggcctcatccaggagccagcgtgcttccgtacatgatcctgtgagtagcagagagcagaatgtgaagtgcaggagtagaccaaggccaaggtcaggtccagctgaggcagccagtgaattccatcacacccagtaaaactgggtttctcccggcatcttctgcaggctgtggcatcaggaggcagattcctgttagaagcagagccccagccctagcccaaggccaactgaatcagaagagcagctcacctgcttcagctccatctgcaggctcagctctcatcacgttctagaccaagcgtggccctggatgagaggcagcctccagcagttggtccaggaaaggtagacagtcctgctgaggccccagtcttatgactgaccatctgcctgaggctgtctcttgcactgtcccctcatagtttcttttctctggccatccccaccccaaccccctcaaggccaggtcctgacagggccccacacctgatctccccctgacagatgctgttggtcccaggcccagagttctgctaaggccacccacctggctctgtgctgctctgttttcattgcctctacaacttcaccccagatctctgtgttagctttgatctgggctcacaaaacgtgtgtcttgcttgttccacttctttgatacgatctcctgaagtcagattcattctcagatccacatctagactaattagaagctttcagtttcaggtaacaacaaaaaaaaaatcccaactctaactggcttcttaaatgaaggaaatttatagatgtctctgaaaaatgcaaaggaaagtggacatcaggtatgacttgatcaggacttccagccccattgttgtgattcttttatctctaatctcctctgtttccttcctcatactagttttttttttttaatggcagaaaatagctgtagcattttcaggcctcaggtacacataccactttggccaggaaagagaaagaggatgtctccttggccaccacatctcattccccatccccccatagcatcatcaaacaaaaatctgattgagccaactcaggttacctgaccatccctgaaccaatcattgtggcaaaggaactagttactcaattggtttaggttaatcaagaaccacatacccatttctcccttccctccagagctaagaatctaatcacttccacctcgaatacacagttttcagtttattataaaaagcagagataaatgattacaggacaaagcctgtgcactatcgtgtgctgcctcaatgtctgctttccctgggctggtggaacacaagggaaaaactgcacacagatgcactctaggtcttgctgtggacatatgctctcatttctttcaggtaaataacctaggagtgggattactgggttgtgtgctaagtatgtttgtaagaaaccaccaacagctttgcaaagtggctaaaccatttgtatttccaccacctacatgtgggattccaggtgccccacatcatcaccagcacttagtattatcagtactattttgttttgttttcattttagccattctattgagcacgagtggcacgtcactgtggttttaatttgcatttccctgacgagccataatgttgggcattttttaacaggcttctttgccatcttctttggtgaaaaatctgtttaaatcattgcccatttgttagtcaggggttttgtcctcttcttattatattgtccaggcagtctctaaatcatcacactcgactaagcactcctctgagtccttctgtccaatttatttccatagccaaatcaatagtgggtagagccattagaaatgatttaaactgatcatggcaatgttttattagttctgtttcttggatttaggtttgcaagagaggtactcataatcagcacggtgcaatgggggaaagaaaatgaagcaatcatttccctttagtatggcacacctggatgtatctgagatgcatcattccagaaatgtgaagagaaaagcaggaacctctcgtggccaggggtgaggactccttccatgtagttttcacatgctccttcaaagtgagtaattttcatgtttctcttgaaactcacttccaaggagcaccatgaaaattactggaaggaatattcaccttctgaaactcactgcctacatcttcggcaaaaattttctttctttctttcttttttttttttttttgagatagagtctcactgcgttgcccatgctggagtgcagtggcacgatcttggctcactacaacctccacctcccaagtttaagcgattctcctgcctcagcctcccgagtagctgagattacaggtgcctgccaccatgcctggctaatttttgtatttttagtagggacagggtttcgccatgttagtcaggctggtctccaactcctgacctcagatgatccgcctgcctcagcctccccaagtgctggacttataggcgtgagccaccgcacatggctggcaaagactttcaatgtacaagttgcccagagtcttaccatcatggcagctgagcactgtcccaagatgagagtccatttttggggcacaaatgtcatttctttccatgacaccacattccccacactgcctcctatcacaggcaagtggggctcttagcaagaatctgccaaatgagcccagggctaattgaaccaaagccaggtcaccccttagcaaaatcacagaaggaggtagagactgggcatccaggcccctctgccccgcaagtagctgaacctgagttgaaggttaagtatagtgaggacaaaagccagtcaggctggcagatgcttgttttatttatgcttccctttaacaagcacacctacagtacttaccttgtggcaggcactgtctcgcagcgttacatatgtgaactcattttgatcctttcaataactcctggagaaagacattgttgagaaaagaggaaaccaaggctcagagaggctgagtactgtgtcagtcacagaaccaatgagttgggagacgttgagggctgcagggatacagctaaacaacacaggcaaagcagggtaactgcttcctcaaggctggctcccagagtcagcttagaccaagggcctcataccctaaagctccctccacagtgtggctgtcctcaacattccttcacagctcagtgccctcttatcaccatgcaacccacttcagtgagtaatcagaggggcacacttgggtgcaaagggactggcagcccagaaaatgccttcttccgcactgctgcaacatgtgacatctgctgagctcgttctcctgctggaccccggccattcactcctgaaccccacaacagctgccgggtgggcccaggcacccctagccttagcacagagacccctcatctccacacctgccctttctgcacaggcagagccagcctgcacaccaagtgaggggaggcgaaggattcccgtcatggccttcgaactccacccttgggcaaaaaagcactggaaagcttcccctggtaaaagggcacacaggacattagcaagtcacaaaagtgtatgtgcagcaggcagggaaggcttccacctctgttccttcgactggtgtccactgaagactccctggtcttccctcctatcaaccccctacacaggtcaccatgtagggagtgacagagcagaccagatttcatgccctaggtccaagcagctacagtccaggtggctatggcctgaaccacaccaggacctgaggcctgagacctcctagaatctaaaaatgcaggcctgtctgtacacaataatgtgaattaaaggtggtttgtctcgtagttatttgtgaatttaaagccagggtcatagtccactgattgtgttctagggagaaatgtttattatagtcttctttgggcagtaagctcattcactgatttaacaaatgtttactgagagcctactatgtgccaggcacagtttcaggcactgaagaggcactagagaaaaaattacattctagtagcaggcttcgagatgttaaatactcaacagaggtgatagattggtaggtaggtgagtgggtgggtggctgagtggatggatggatggatagatggagagagagtaagatattaatatagtgggatagtgggatagtgagatagggagaagatatatggagtcaagtggtggccaatgctatgaaaaagcaatacagcatggtaagcgttaaagaaagtacatgagagagaagttactgtgttataaagagttttcagggaagacacccctgcaagcactgatagcatagtgccgtgaaaaaatattaagacattgcactctgtgaagaaaatggcaccatttaaaatgtagactctgatttggtgcagttttgaacatgagtcactctctgagcagaaggaatgtgccatcccagtaaactgccagccattgcccccaggaacagtgtaaaatgctggtcttctaggttcacaagctagagtaagaaaacagcaaggccaagggcaacaggaagaggcatattcatcgaccatccccaaccctggcaacagtgaaatgcatgatgtgtctaagcagacacatcacgcattttttctgctgagggaatcactgtgctaggctgtgagctccccaagaatgcagcccgtctctgcctgttccttactgcatctgcagcaccaacagtagtgtcacatatggtaagggctgaagcatcttcgataagggcctggctagctgatatcctgcccttgatgcagggcaggggaggatgagtatatgatcagagttcacagggcccttcagctggcacaaacgtgctcagggactattctaggggtgcctgggtagtcagatggatgcatggatgaatgagtatcacaagttgccaccagatacaccaaagacaaggtgagttgaaacagcacaaactctgggtagcatttgagacacagtcatgaaaccgaattattgatttcatgtggacttccattcactgctttttagcggcaggcacaaagcatactgaggtgaacaaaacaggaaaggtttcttcccttctagagctcacagacccatgggagaacacaggcaaggagcatctgaaccaatcaatgatcagataatagaagacaaaagttattgatggaaatgcattgggcaatgggatgggtggtgaacagtggagaaggtggaggaacagctttagcgagggtgatcggggaagtgtctcaaagaaaccccaaatcatgacagcaactccaatcaagatctaggagaagaaacttccaggtgggaagaagagtaaatgttcatacagaagcaagcttgacatgttcgaggatcatggaataggccagtttggagcctggtgaagaaggggagtatggctgggagtgctcagagaggtggtagccaggggccgatcatgtccagccttgggtcatgctgaggatatgggtgcattgggaagctacgggagagttttaagctgttgactaccgttatgcaatttatattctgggaatatcaccccaactgcttggcagagaaaggatactacaggggcatgatggtggccgggagaccaggtaggaagcctgtggtaagacttgagtggcgttgtcagcagtaaagataagaagtggttgctgtctttagaatattttttggaggtgatgccaagagggtttgcaggtcagttggaaataggagtgatgacatgggaaaaatcatggaacactcctggatatttgccctgagcagtataaattgattaagcaatatttgttaactgtacaaatgagtacaaatcgccatgagcaattaggagcttgtgttcagaaagtaggcatcctgttatccaacacattctgaggttgaccgttatgagtcagatccagaaagttggtagggtctctgagtaaatggtgagattttaattaaaagttgttgatgttattcactggccctgcccaacctcctgagccgcccaaccctcttacagtcacagcttcccttggtggcacttgtagtgaaagccctgattggctccttctaggacttcagatacggtgacacctatgtcctggatagcactgcccatctccaggtcaacctcagtctttatgaatttgaaattggcacctaggagctccatagacccctggtggccatgcttttgcatatggtggagcaggacgtgaacaggtgaaatacacagcatttgctacggtgtggattgacccatcttattctctgtcctctgctttctcacaccccctttccccgcccatcttaggtccagctagagtttggatattttatcagactctgctaggctgcaatatcattagcatgtctttattctgtgttccctgagctcctgacaagccttatctctacttgttaatccatcagacaagaaggactcagtttgcaattttattttattttttaataaatacaattttttgctaggcactgtggctcacacctgtggccccagcactttggaaggccaaggtgggtggattgcttgagcctaggagttccacaacgaacggcctgggcaacatagtgagaccccatttctaaaaaaagtttaagaattagccaggtgtggtagttcacacctatattccccactacttgggaggctaaggtgggaggatcacttgagcctgggtagttgaggctgcagtgagctttgatcacaccactgcactccagcctgggcaacagagtgaaataacccaaaaataaaaataaccccaaaaataaaataaaatatatataattttagaaaacacgtatgggatacatatttttgcatatttattaggtacatgtgatattttattacatgcatagaatatataataatcaaatctgggtatttagagtgtctgtcacctccagtatttatcatttctacatgttgggaacgtttcaagtcctctcttctagctactttgaaatatacactacattgttgttcattgtggtcaccctactctgccatcaaatattataacttattctttttacctaattgtatgtttgtacccattaaccaacctctcttcatctcccctcaccccacaccctgcccagttgctggtatccatcattctactttctgcctccatgagattaactattttagctcctacatatgaatgagaacatgagatatttgtctttctgtgcctggcttattttcactgaacatgatgacgtccaattccatccgcgttgctgcagatgacagcatttcattctttgttatggccaaatagtattcccttgaatgtatatgccacatttcacccactcatccattcgtggagacttaggttgattctatacctttgctattgtgaacagagctgcaacaaacgacagtgcagcgtatcccttcaatactgagtttgcaatcttaaaatggagaagtgaaggacacaatcaaaggaaagtttgaggggtgtttttgggatttttttaatatgacagaatacttttctagtcaaatcctttttattctaggccaatctccttttattttttgtgaagtaagacatttgtggcctcctgctgcagctgctctttcctgcaggggaaatctcactctgcatttgaatggaaacctggagcctggacctgagcctgaatctccaagtgagaaagaaactaatgccattaacctttccagatggtgtgcagaccatctagggcaatgggagggctcatgtaccacgtgtccggctttcactggcaaagtaagattgtgttgcagttggctgggggctctccctcccctgacccaaccaagggggtgacatatcttgtgtgtggaagggaggatgagtttcttcttcccttccctatagtgcatatacctgagtgccattgcctgggagaggagaaagaataaagcacactggcctcagtgtgctttatttacttgtgactttctcccacagtgaaattgtgactgcagttggggcatggaaaattagaattagggcacttggtgaggtaccagcagctgggggactcaaggcgtgggtacagctgttagacaacattaaacccctgcccttcgtcattttaagatattggtcattatacagtaaactttactttttccactctcttgctctgtctttgattactgcaacatgcagcttctaaacacatgtgtcccagcctccccatagcatctttgtgcttgacctttttcttaaataaaaatttaaatatatatatatgtatatacacacacacacacacgcacacacacacctttcttttactcccagttgctatttttattttaaattaaaaatagttttcatatgaatagctaatctttactgggaactcagttgagtcgatgtgaaattacatgcatgaactcgtttaatctttgtatcaaccccatggtgtcggttcttctttcttcattgtacatatgagaaaatagagcccagagagggaggttgagaaacataccccaggccacacatccaggaatagcagagttaggatgcagaacaaggcaatttgcttccagaatttgtgttcttgatctctgtggggcacacatgagtcagtggagcaaaacaggacagaggggctcccgtcctggaggctgtagaacatgtctcacaaatggaggaggagggcgccctagactgtcttgcggtccctcccgcgcacctggcggactgcgtgtatgatgtggtccctcccgcgcacctggcggacggcgtgtgtgatgcggtccctcccgcgcacctggtggcctgcatgtgtgatgcggtccctcccgtgcatctggaggactgcgtgtatgatgcagaccctcccgcgcatctgtatatgtatgatgtgtccctgggcctttttggtttagaacacctgatagtgctgagcctggctacccaggtgctcatctctgagtggaacacaagatgctgcctcctgttagacactgagactctattccgagctacgtttatgcatgccctcattatggaatttagcagggattgaaatgtggtgtgggactaaatggaatttgaggcctttctgataccatttcctgatgccaatacgctgtggtgctgggatgttctgcagaatgaagcgtgggaagacgcaccttccctcatcctgatgagtttgttcagcccatcctgttcctggcatctactctctttgggaagaattgactctgtttaagggataaggaggaaagcttgagaggggaacagccaggagattcttctatgacccgcggagtcaaagctcagccatgtccttggtaaacgtgtgctttcctgttttggaaacatgttggcgtcgaagtccttgcagggcttggcttggcttatgctacctgtgaaggtccaggagccaggttgaaggcccgtgggggtcattctgagggaaggcctcagtgctcttggtacagagttgagaatcaggtcagggtggaaaacacgtggctttcacccaaacaggggttgatctcccagcgctcccagcctcccctcggccccagctccagctccagaccctgccagcttggcctagacaaacccattaggaggcgccatttctcgctggactcttaaattctgcccagcggttaagtccagaacacctactaagagtcatcatattcatatgaaggcttcaggagggcctctgagagcccttttaaatgccatcaaaaaagtcagctctgcaatttcatgtaaagaaacaagaatatcatgatcaaatatatctccttaatttttatgacaataaaataaaagaattgtgcacatctgtcatctcacataaataaaaatggattttaatgaagtgctactctacaagtttgaactgaagcaaaatgtttaatataaagtgtgcagctccaattctggccttgggcagagagagtaattgtaaatattagtcatattgtattattatgcacaagcactaagctaagtgggttttgtgtatgtgtgctttcttaaaaatattttagaaatgagttcttgtcctgtcacccaggctggagtgcagtggcataatcatagctcactgcagcttcaaactcctgggctccagtgatcctcccacctcagcctcctgagtagctaggactacaggcaggtgccaccacacctggctaatttttaaaatgtttttgtagtgacagggtctccctatgttgcttaggctagtctcaaactcctggcctcaagtgatccccccacttctgcctcccaaggcactgagattgcaggtgtgagcccctgcacctggccaacgctaagtttttcatatggttctggaggctaactgcccacattcaaatcttggcctccccacatcttgaatacatgaacttcagaagttacttaaccttgctgtacctaagttttctcatctactaaatgggagtaataataatatctacctaatagggttgttgtggtgttgatatatgtttatatatgtaaaacacccagaagacccattcgccttctcctctacctgtgttgccagcaagagtttggcttgggctttctgcccagcacagaagcttgtctgggcggtggtcccaatccactttttcatggggccctcttgcccagaagctccaggtctattttcagcctctgcagctgccctctcagaaatctcctgtttctttggtgccccagttccctggtctgttccggccagcaagagctcaaggagttggaattccctttatgtggggatccacacttcaaaaagaataaaaaagcaacgcacccacaacctatgtatctgcgtcatccctcctccactcatggagatcacagacccagggtgaacccatgctcccccttctgactcctgccctgttgacaaaaccagggaagtcaccaacaccatcctagttgttccacagagagctgaggttagatgtagccctttctcagaacggtgttgacacatgattcatgcaagggctcctgagacgtcagaatgttcacggccatgctacaagccgggaatgtgaatctgagagtcctacaagtctcatctctccagtccctccatgcacagcctctcagctggctctggtctgcagtgctggtgttttccataaaagaggggtgtaagttaatgtttaagactcctattactaataataattgaaacagtaataggagtagtagtagcattaatttaaagttattattattggccaagcacggtggctcacgcctgtaatcccagcattttaggaggctgaggcggacggatcacctgaggtcaggagttcgagaccagcctgggcaacatggtgaaaccctgtctctactaaaaatacaaaaattagctgggtgtggctggcgggtgcctgtaaccccagcaacttgggaggctgaggcaggagaatcgcttgaacctgggaggtggaagttgcagtgagccgagattgtgccactgcactccagcctgggcgacaagagcaaaactgtgtctcaaataaataaataagttattattgttattgttattcctaacatgtattgatggctcctgggcaccgcactttgttgtttatatacattattttatttaatcttttctagagtcccctgaaaaaagtactatcattgtccccattttacagatgaaaaatcagagatgtagctcatcagtgttggtgtcaatgggtggcttgggagagcttttgcccacctactccacacacaagcccccacagtgtccttgctataaagatatgacttcagaaaaaaccctctaccttctcctttacccagacagatgcctggacctcttctttaaagcttcgaaaccacagctggttttcagtttcacccaggtaggaaatgtccaatccaaacttccaacccaggtctggccaactctagaatccaagccataacacactgtatactattatatatttaccaaaagacatacacatctaccaagagagtccccatgctaagcatggcttggcttgagaactccttcttcacaagcatcaacatctaaaggagtctctcatcacgtacatgaaatccctgcttatggctctgtccagaggaggcctgtccaaaccagatggcaaaggcacgggagtccctgactctctctctgcgctaatgagtcagcaggcaggtgtgtggggagttgaaagccagccacatgtccggcaagcagaccactctctgctaccactggaggcatcagccagctgaggggggctcatcacacccgcaccgtggttcagctgagcaagattgcttaggaagagcctggcatgttcacggtgcatgtggagttaagtcctagtaaaacaagtcagggtttcagtctctctggaattgtcaccctgtttaaagtcctgaaatcacacagcgtggcactagtcatggaaccaaagttcatctaccaaagtcccaagtgggatttagaagtaaatgaatccttacatgtaattgagtctctggccctgatttgaccagagttggacctgactcaggaattccctggtcctggcttaacttttgtgggggttttggtctgggcagtcctggccacaccacagcatctgcccgctgaacagatgcagctgtggggtcagacagctcagcagggggtgatggcatatgctgaattttggcatcttcaactttgtgtaccctaatttctctccttttccaaagaaaagagttccgtgtggaatgggggctggtgatggatgtttctgaggttgtttgccggctcttggtgctcacgtatcaagtgggacaatcagagaatcaatggactccataaatagtccggaatgacttcctatttgtgaccaaatccctcctgagtctgaacacctgttcgcccagcaggctggctgttgtcaaaccacttggcagttgtttgaaagcaggaagtcttttctccatcagaagaaagaagaggtttcccataactatcagacttcgggtacatatttcccttcagttctttttttattattccttaaattcattgttcattttggaactaagtgtgctgtctgttgctggccttggagccacattatgcacatattcaaagaaaaaaaaacaaggctgtgagttccaggggtgacacctgcagctgtcctggcatcctggtgcacaccgagctggtgcgtatgagagcaactgagcaatggtagcctctgttacccctgggtctgtgctgagccccatcattcacgtgtctctgtaagggcttcgaaaggaagctcaaggctcccatgctactacatcatgaaaggcagcagagatgtctgcaatccccgggcagcacagtgtggtccagtcacttactccatcggtgagtatcttctgagtgacaattctagggctcggggatatgatggtgaccaagacaggaaaggcccatgctctcaaggtgcttctgtgctgccagagggaaggtagatgatcaataagaaaaaataaaccagcaaggtaatctccagtaggagtggtctgaagagagtaaaatagggggacgtcagggcctagtgggagtgaggggctggcatgagccaccacagatgggaagggaacaaaggcctctatgaagagggaatcttggggctgagaccctagtggtatgaaggaggagccatgtgaagacctagaacattccaggaagagtgaactcccactccaaagccgtgaggcaggaacagagtgactcggttaggggaacagaaagaagaccgctgatgctggagagcagggtcctgggtgaagccaagggctaggcagggctgggtggggggtcctggggccttggtgagcagtttagttgcaattaggacaatgatctaggaacttgcagtccttgggagcagtgataaatcacagagagtagaaaggagtcagaacccccagtgttaacctagatctctgaaggtgctcagtggttctaaactagcttattgtcatggaccaagcattgctaacacgacctcaagtgtgagcctccgccagagccctggatgcctttgagtgttcgctcaaatccccctactgcaggctctgaggaatttcctccattaccctctgcctaccctcctctctcaggagctctgcatccccacttcaaagcaccccaccttccctcagtctttgttccattcctgacagattgtgcaggtggtcaggcttaaccgccttctcctcattgtctaaatctcatcctttttccacaggctgtcagcattcccctcttacaggtgaccattttgattaacggatcccaggctttagcatttgccaccctctctctgggtaccatttcccttccatcccattttgatattagaacactcagtctgaccacggcttatgctattttaaagtataagagttaaattaggaaaaaaaacacgttggcctcatctcaatcctggaatggtcctagatttgggaaactcccagagagtgtgggatggtcaaagatcaagcaaagagattattttcaccgtttgtacaaagtgtatgattgatcagatttacttaaggctccatcatcacacagtttaaccacagctgtctgatgtctaaagacttttacactgtgtttatttccagtcctttctcctgtgattttttttttaatcacttacatctactggctagtctgtttccaattaagacttctactaagctttctctacgaaagaggtttttcttttcttttctttataaaatgcatccttggtattagaacgtaatagcaacatatgagtttctgaagctgaagtcaactgattcttaaagattcttagaatatatattggctgccactaagagattaatgtcaaccccacaagcctgccatatcaattatccctatgtttgttcattcagagctgtaacacgtgctgtctgctttttaattcagcataggccttcttacatctacccattgagtctctgtttagtgacctgatttttcgacgtcttccccagaaagtcacaaccactgcatttttaagcttcagttttccccttgaatcaacccatcgaacgtgccaaaccaaaagaaaactaataaaatttaatagcattgaaaagaaaaacaaattatacctatcagactgctttttttccctaactcctccactcaagaggtttggggagactggaagggaagaggctacacctcttgtcctctctgctctgaatgactgtgcccacttctgaagccaattctgacacccagccctgaattcctagtctgggaacagatattctaaaagcctagaaacatcctcagctttggtctcatgatatcccccagctggacttcctatttggccagcatgagcagcaaagcaaaagaaagttggccaaactgccagtttcccagccttcctctccatcagggcctgtggcagcacacccaaaactgtgctcaatagattcctctccctgaaaattacccaggggtgcaggtgaggcagacctgcctgcctgcctgttccatgtgaacataccactcgccagtgtgcatagccttgtcatgttctagttactgctgcctgagtgctagaggcttccaatatggggaaggatgacatatcatttaaattagctccttttatggcaggaatgattctggttgacattggctcaggcagtgcccatagagataatagcagttggtattgattttattttttattttgtagctcagggtgtttaaaaatgtttggtgctgaaatgcaaaaacacaaaatttttgcaggggattttaagctccagtaaagctctaaaacctctcactaaatttgaatctggatgactgctttgcaaatgatattcatctgactttgatgagtgaatttttaaactcagggaagtaaccgcttctttgtgcataaatataaataggaagcatttgtgaatccctcatatgtaggagggagatgagaaaagcagggacttataggactgagaatgcagagggaagaaggccagggaaggtcatgaaccagaggagaatgcccatggcatagaaggatgtcagaaagcaggaggtccaatccctcattttgcaggtgaatgaactggtggtcagaacagggtgtggcctgtgcaagtccacacagtgaagaactatcaaactaggacttgaaccccactgttctgctttggtcattccagtgtatatgtggacagtgtgcggccaagccatgcctcacacttggtacacctgtcaacccttgtccctctgcagcccctcaggcccctctgtgaattaaggaagagaatgtaggcatagaagagggttggacgtgtgaatgagtttagatgtttatcttcaaggaagccaccagaaatatgagtcagttcacagacgtcctttgagaacccataacatgggacttgcctccttctcctgccctgatccccaattgaaactgattctttagactccccatagttctttttcctggacaccaatccagtgaacaatctcactgtgcatcctctccacctgctgtactctatggaatgctttcttcctcctgaaacccctcttttctcaccccaaatggtagcattccttctcccacagagatgctcttggccacacctccttcaaaagggatggtctcatctgatctcatgacatcagtcccctcctctggcaccccactcctcatccttggtcttgatttttctcccatcctcatgacttagtttacaaatgggtgccagatctttccagcccgggccttctgaggcaggctccaattgggggtctaagctatgaactaaattacttgctcattaatgtaccatttcacctgagttcttctggtacattgggtgcacctttgtggtttctgtcactcagcctttaagcctcagcttcatggccgactgtccacatccagactgctgtcaaatctaatcaattcttccactgtagcatttctcatcctgccccttgctttccaagtccactgcaccatacactccagacctccactcttggtcaactggactgccaaagtcccctcacccctgtctctctgttctttatcctctgctccatcaaattcattttcatactgataaggcttcctgagcctccactctgacgttgcctcttgcctgaaaggccccctttgctggtcacatcccagtagccctttctcatgtctagctgtctttcccctgtccatatctacagcagaactgaactgctcgttgtgtcttacctttgttgtcttacctgtgtgcttgtgcttatgttgttcttcctaaccagaatgccctttttcatctctgttcacttcaacccatctcccaattttaaaagtgcaagtcatttttgtccttcaaatctgtagtctgtgtcacctcctgcaagaagccttccctggtttccccaggtggacacaatcttctcttctttgaactgccatagcaatctttcggttttatcttgatattggtgtgggccgatgatagtctttaatagactcctaaacttgttcgtctgaattgattgttctggtatttgctttctttggtgatgatgatatggagtaagagtgtatagaaaaatacatacacagatgactgttaattagcaacataagatttaaatacatattaaagaccacaagaaatgtgaagttactggttggtaaatgattaccaaatggattgtacagacttcaagatcccaatgcatcattctacaacatgagttaaagtcagtcctttaatatctgtaccatttgctggtgtcttctcatttaggacacacagttctatgagaagcataactaggtaaataacttttctttgcagattagcaatacttgctccatttttcatgtatgctttggttgtttctatagaatgaccgtgtcacaataaggcttttaaaaagaataataatatgttttttaagttgtcaaaaaggagggtgtaatgtataatggaggcagaggttcttcgttgatctaagttcagcattcattatctgaatcactgctgttggcaggttgcataggaaagcaaacttgtcaaaacacacaatattcactaatgatctgaccgctttaaaaacctaggccccctcctactttttttcctgcttaacaatagcatctctccccattcattacataagccaatttttggccatttgttggaaattgtaacattcccataaaaatacaaactgactgcaaactgaaactgaaaatctggcagagatagagggtttcatgaggcagacgtgttgaatgatgtctccatcccacgtacaaaggcattaatgaaggaggctcctgcaattgaggaagaaaaaaagtcaaggatgacaacccaggttctctatccccccaaagaaaatgatactaatattaaaggatcaggatggagacttggaaaacttgatgaaactcttgaatgtttttccccaaactctctttatgaccatgcaggaaaatgaaatacgaaggagggggttattatcttatgttcttctaccattttatggggaaattacaccaaggaacaattaacttggtggcaggacatggttgctcttataacctgatttttttttttcagttataaagacttttatttctgtcctaccacaatagagaaatcttaattttttagtatttatttttatgtatgtatttatttattttttaattttactttaagttccaggatacatgtgcagactgtgcaggcttttgttatataggtatacatgtaccatggtggtttgctgctatcaacctgtcatctaggttttaagccccgcatgcattaggtatttgtcctaatgctctccctccccttgccccccacctccaacaggccccggtgtgtgttgttcccctccctgtgtccatgtgttttcattagaacctaaatttttaagaaaacattaggttcacatgttttgcttttgaagctaaaatctcaatgcaaccattctttacttatgcaacttattcccatttcaggtagtttacctgaccatgtcttttctttaccagctatcctcatatttattaagtttaaataatgggagaagtgtctttctctgaaaaaggactttgagaccacaaagagtttggtttggagctgtgtgcctgtgagtcaggtggaagtgatagcagtaactggaactttgcagtgtttgccaacaaatggaacagactttcattcatcttaggtttaaccacaaatcctctgtttctactcactgagtcaatacatcttgaatcgcagaccaggaaactcaggtggaaaactgctcatttgttttctttatgagctaactacagtccatcaccccaattccagtgaaataaagctttttgtgacagttggtacttttttcttatttttctttcctgtttcttttgtcttcctcggctttcttcttctccttttccttccacttccttcttatcattctcttcattctccccttcttttatttttctttttggttttcattctgttttgtaccaaattgttgtttcagttacaaaggaaaacattgggatctcctaggtacaattttgcttctccaaggtgtacaacattaatcttaaaataaacccgagagatgaggtggtctaccccactctggcctagagacggaacagtggggctgggctgggaccccacagatgcacagccccaagccacatccttaggcagctgcctgccatgcctcttgagggatagccacagaggggattgacaagaatctagggatatcaaatcttggagccttttttctgcatcaagttttgtattccccagaagtaggacctcagacaaagattctagagcagttaatttatttgggataggatcctaggaaacactgagtggggagtgggagagaaagacaaaggagagaataaaggcaaccaaaggtgtgttatcaagcaggtcactgctctggacaccaaggtttgaccccatggtggaatcctggaagatgatggggtacacatacttcagagtggccacctggggggtcagagagctggaatatttgtacaccagctcccattagtcagtgctgccccttgagggtatcactcctgagcacatccagcctggccatgtgagggcagagtgggctcgggccaccagggcacttggacagagttgcgggcactggaagctggaagtccagcccccatgcatggaaagggctggtaagatatacaggcaggaaccagctgtatctgccacacaccacatcacagaaacacactgcagagggcacagcgtccactcttctacactcaggtaggaagatgctggcttcacggatgctaaattcccttttcaacaaggatggcaggaaggggtcctagaaggccaggacagacctagatccaagtgactgcctcacagaaggaaccccatggggaaggtctcatcaatgcactcaacaatgcagattcaacaggcgggcagactcagcttagagcagaagatggatatcattcagcccatctccactgcaagattcctcacttctctgcctttttctcagtcattagagtgaaggtcaaatctatcactggagtggttcttggaacagagaagaaaagaagtggctgtaacccgttgagagattttttgaatacaggagtcagtctgatagctcaaccaggattcttgatccccacttaggactctctaagcagagtagcccatacatgattgtcttcattttcatccataaagccactggacaaatggatggaaatgggaaaatatacctggctgcagcagagcctttggccaagtccagaacctttccaaaggcttttttgactttcaggaattgggatggtttgttccttcatctgcccttccactaaccagaccatcttccagaatggaaatcatagtaagagtgcagaataatctcagggttccaagaggacattagggactattcaatccaaattttctcccaatacagtactccttgaagggtctgttggtcccacacctatcgggctgtgtccctttgcttcacaatcactgcccttagcaagaggttcctgcatggctgagtctaacactgacccttggcctcttcctcctttacataaagcagcctttggcgcacttgttcactcctggaatcgttgcttcccgcagcctccaggctccccgttgccctggccatcctcttacctcccctgcctgcccaccttggttgctttttctctcctccccactgaggtgttatgtcttctgacaatgttccttctctctccacactcgctttcaggcttgcggctttccataccttctgtgcgctgatgaggctagccacccgtccctagttgtctacttgacagtctcaaatatgtccagacctgctctcctggccctccccgcaacatcaaatcttctaagtaaatggtgtctccatctttccagcagctctaacaaaccttggggccatccttggttgaccctatgccccatatcccatgtcaaagctaacaggaaatcctgtggatttaccttcaaaatacatccagatgcaaagttactgctagacgggaggaagaagctctggcattctgtagcaccacagggcgaatatggttgacagtgatttagtgtatactttcaagaagctagaagagaggatttttaatgtgcacaacacaaagaaatgatcaatgttcaaggtgatggatctgctgtgtaccctgatgtgatcgttaagcattgtatacatgtatcaaatatcactctgtatcctacaaatatgcacagttatttaatatcacatgtcaatgaaaagtaaaaggaaaaaaataaaactcaagaacccttaagaaaagtgtgtgtgtgtgtgtgtgtgtgtgtgtgtgtgtaaaataaatgtttttaaaaatacatccagaatctgaccactgtgatcaccccccctctgctgccatctggctcagctgccacaatccctccttgggatgactgcaggaggcccctcagggctctccctgtttctttcctcatctcctggtgggtgctctgtgccccaccaagcactcagaatcgtgtcagaaggtctgagtagagccactccacttacaccctccaccagggtcccattgtgcttagagtaaaaggcaaactcagacttcctcacctacagtccaacccttcctcaggtccctccagtctccctggccaccttgctgtttcccacacggtcctgccttggcacctgctctgactttgttcatggacatctgtgccccagacttccaatgttctcttcctcatgactttccaaatgtcaccatcttggtaaggtcttttgtggtcaccctactcacatgttcacacacgtccccacccagaacccccagttccccttctctgtcttttaagttttaattctccatcctatgtatcatcatgaacatgctgtataatttaaaatctatttgtgtattataaaacttcctccaatgggatgtgagcattatggggcagacagctttatcaattttgtttcttgctctatcctcagtatctgaacagtgcccaaaatccatttggtggctgaatgatggctgaacaaacaccataatcaagtgcctatccccaatggcttatagttcagggataaagagcctaccattttacaaggcacttctattatttttttaaagagttcttttctaaagagttcttttttagagtatcttgctgaattctccctggaatgtgtggcagttggttcagtttctgcattctctgccaaaacaaaatacatctattccccgttttaatcaaataatctcagatcaattcctgggcgtcacttccacctatgatggaaaccgttctctgcctcttggcctcaagacacctgttcctccttgggatgttcacgcatggccaatgtctccattacagagtgggacccagacctggaggatattattctctagaagtgtaatgaacaatgctgagcatggagagatgcccacctcttccccatcacatgaaaaaccttttcacccagatgaaggcttccttggtttgcgtagctgttgatgctcacccttgactcatgggaatgtttgaacagctccagtctccatgtatttttcccatgcaccaccctgttctatattaagatgtgaaattctttgcgttcaacccgcttacaccacccttgtttgtcctggcgcagactgttgacatccttttaaatcttgattctcttatgcgggggctggctctgcctcccagttgtgtatatccacagatctgatgagcagtttcaacagtgtgatgagggtgggacagtttgcatctggaatctttaagagattgcaattgagagtgtgattaagagcttgagatttacagccagactgttgggactaaaatctatctttaccatttgctatctgtatgaagttgagcaaattaattaaattctctgtgcctcagtttcctcaactgtaaaatggattaataataatagctttacctcatggagtaattgcattaactaaatgagttaatacactcagagtacttagaatggcaccagctatatagaaagtactcagtaaaaatgacctgttattatgctcttggacatgcaatatctttctcctagaatgtgcttcatgcagggctgggccccagcccatcctctcctggaagctgtcccttagtgccacaggcccattgattctccttcctccagatattagtttttaccacagaacctggcaaagatcgctttggatcccattccaccgttcttgcccacttagcacatgttattctgggccacaaagatggactgtgggcactggaagagcaagtgccattgcacagcaggttcttattaaccaaagacgcagcccaaattgtagcgttgggagagtgcactcggtgacactgaggcctctgttgttgccatgtggattcaagttaaaatgccactgactctacagctgctgtgactttgcctcttttcctaagtggatccttgacctggatcactctgctaagaacactaagactggtaatcaataatgaggctggattagaaggaagatgaatgatccactgggttagcgtttaacaacccaaattgaaatttgctggtgggacgtgtgtgtgtgggtatgtgtgcactgtgattagtgaatctcttctgtttgctcatcatccaaaccataatctttttgttaaagccgtaatcttttaagctttaattttacagactatgtggtctttagcttcatccttaaacagatctgtaagggtaaagcatcttaaccaccaagtggtttgattccttctcccattggttttgttgttatttggttcagattttcttatgtttttggtgggggaagaggagagtcatttaaaaatatatatatcatggagggatcaaatcagagtccggaagttgtaaatgaattaattaaatgctgtcaccagttgggttctctggaagcagacacgaagacagagttttgagtgcaagatattttttaatcaatacctatgttagtccattctcaaattgctataactaaatagctgagactgggtaatttataaagaaaatagttttaattggctcgcattctgcagactgtacaggaaacataatgctggcatctgttctgtttctggagaggcctcaggaagcttacaatggtgacggaaggtgaagggaaagcaggcatatcacacggccagagcaggagcaagagagagcaaggcaggaggtgctacacactttcaaacaaccagatctctaaaaaattcactcactatcacgagaacagcaccaaacggatgatgctaaaccattcatgagaaatccactcccatgttccaatcagctaccagcaccagaacaaaacaggcagaacaagaggggatagctttgcttgctgagtcttctggctcttttattcttcccacactggacccttgcttctgttcctcctgcccttggacatcagactccaggttctttggcctttggactctgagacttgcaccagtggcttcctggggactctcagacctttgcccacagactgaaggctacactgttggcttccctgcttttgaggcttttggactcagactgagccactactggcttctctcttccccagcttgcagacagcctatggtgggacttcaccttgtaattatctgagccaattctccctaataaactccttctataggtacatagatcctattggtgctgtccctctgagacccctaactaatacaatgcctgtgaaaggaaaggagaggaagatgaagtcaagccatgatgcaggctcaccagagtcccagccaagctgacaaagagttctggaacaaatatggttcatcctggaaccaaactgccaggaatgtataccactgcctctgtgtcagtggatgtgggccttccaggaagggtgtgatgtgggcgaggtagctctctgcagctgaggctgacccagcccagtggagccaacagcttgaagccacctgatggccacatccctctgcagctggacagcagatccttccttgcagggagtttgtgtgtcacctctccatgcctgccacgtgtgctttacagccctctagacagagtcattcaggacctctgaacactcacaaacacttaggcaggggacaacatgttaggggaggtggggtgagtgcttgacaattttttaacaaatgctgtgacctcccagttctcaggccaactgtccatctgagacggctaacctagatctgcccaccaatgctggggccacccaaacagtaggcacttggactatgaatgaaaagtttccatggtcaaaatcacccccaagaaaatgggttccaggaagtgtctaatcatctggaggacatgggaagatctaggggccatttaggagtttcgaccagcaatgatgagccactcccttagggatgtcagtaggcctcccacctctcattccccttctgggctcttcagccaagagcccaaacctgcttctgtccaaggtgctacttaggcagctgagaaccccctttagggcctttttgatacataggaggaaggaaagaagcaaaccatttcctgcagatgccccgagttctccgttgggcagaagaaccatgggccaaacgcctactctttctttcatccattcaatgtttgttgagtgcctgtttgtagtgaaccaagcagatgaagcccctcccctcatgagctttacattccctggaatatatggtgcatcagacacaatgctggagattgcacgtgaagtcaaatggaatgaccccagcctagaaagcaaacaatcttatgagtcaaagctcaaaatgaatctgacttcatagggctcctctcgagcagatcctttcaattcattttccctggactctcgagtctgatgaagtatgagaatctagacgaggccgtggagcctgcctggtggcctgcaagccagcgcatctgtgctgtgccacccacctctgctggtagttagaaggacaaggacagcatgcccctaaagcacctctgagtgtcacctggaggtgttgggcaagaagctcccatgactgtggcagccacagacatgcattcaagcccttctcccgctgcctctagcagtgaggaagggagcaacaccctgggactcaaagcggcagggctttgaggtgtccattggagctggccttggtatcacagtattttcttctcacgtaggctcaggagacattgtccatgacttttgtttcagggaagatctggagaggcaaatggtcatgaaacctctgctgttgcaaaccaagactgcctgcaggagggcggcttgggctttctttctgaggtctggagccagggactgttcccagtggggaagtttgctgcccacaatctctatcctaaacctcatattcccagatcccatccctagcccataagtttctgcctgtcacagcagcaattataaaaagagggatttaataaaaagaatagtggtgtcccagcaggaatttccagtccacggttcagacgaggcggcatgttacataatgaaaagactaaagggccctgggactttctttttgatctccaacttccaagccagatcctggggagcttaaaaactcctctcatcttattttaaatgatctcatttcaggttttgttgtgtttttgttttttgttttttttttccttcttcactttaaattgacttctcctcctagcatttccacggagcatctacctggaaattcgcaggaaaggagtgtcagcctgtcctaaaacatgtttggtactagtggtggggaaagatggggaagaaggtcactagtggggagcccactttccagccccagcagtgggatgggtaagagtcaggctgtctacatccaggttccaacttcattgctttgttagtctacttgggctgccatagcaaagcacagcagagtgggtggcttacacaacagaaatttattttctcacacttctggaggctggaagtctgagatcaaggtgtcaggagggttgctgtcttctggctttgcctcctcaccttgcaggtgccgtcttccccctccccatgtcttcacaggctcttccctctgtgcatgtatcctaatttcctgttcttataaggacaccagtcatatgggattaggacccacccctatgacctcattttaactttaattacttctttaaaggccctagctccaaatacagctgccttctgtgatactagggggtaagacttcaacatatgaatgttgggggagagagaattcagcccgtgacaaccatgtaccaactaggtgaccttaaccaagtgctttttaagcctcttgtgcctctgttaccacatacgaaaaatgggcacagtgatagtgcttcctagtgggattgttgtaaagattaaatgagttaatacctcgtgagttaggtatgatctaaaacagtgttgggaactgttacttcagatgaaagctgagcaaattctcaaggcatagccctttcatgcttatgatccatgggatcgaggcatgcccaactttgtcctcagatccagaaagcttgtgtggccagttatttttactgttggaaagtgctgcgttgttcagattcccacaaaccaaactgtaaaaccacggcagggtgaaccaccagggcagcccagagctccagccagctaccccactttgctccccgagtgccccacatcccaccctgcctgattacagaggcttaaaatgtgacagcaaattattttattctcctccctcccatcaaaaagtggcatctaattacccttctcttgataaggagccagctcagcaattcccttacagcaaatatgagacataagtgaccttgcatggctcccaggctaggtcagaaaaagcattatggctttctccttggtttgctctctctctttttcttgggacattgatctttggagctggtagccaccatgaagcaagcccagctacctgaaggcaccgtgctgaagagaccatacatggagagagatgctcagggagcctcagatgttctctccccaactgtttgaatgtttccagctgggaagccagactcagaatatgtactatgcatatgatttcagcctgcaatcctcaagccaccccaatcgatgccaactagagcagagatgagctttcccgtggatccataggatctgtgatcatgagaatggttgttttatgctaccacatgttggagtaactttttaagcaactgacattactggagcatagatacatagataaaatccagccactctcagacaaggcaatgtgggtgcttctcaaggcccctaaacaaggaagtgcctccagctcctccctttggtgcattgggttgtagatctatgattatgagctctacatccttttttattagtatacgttgtatgtatgttattaaaaactgccagaaggaacttctgtttgttggtgaatgacagctgatagggtcttaaaagaagaccaagtctgattatgagatggccgtgcgggtaaaaagtgatgtgtacagattaaactatggcaagggaaaatcttggctgaggggaaagtttatcaagaaacaggtttgggggatacctatggttttaagatactttattctgcagggaaaaaatctcctatgactcaccaaaagggtcacaagaccacccaccttggcccaccaaccctcttttgcattttcagaggaactggaccacttttttccttggctgactcactccacagtctccagtgttaatttagacatcccatcagtctatctagcctgagggtctcccagcacaaagaggctatcatcctgcaaatccacccatgacacctttactagttaggcagatctttttatcagggcagcttccagcatgttagaaataagattaaacgattactctttttcctttggaataaaagaaatgatgattggggagtcttaagtgtctgtgtgttgtcaatcttttttgggggggaaagcttgaagagataacgattgtattcaagcatctcaaattcaaggctctttcaaaaccagtatattctgcagtgctctgcaaggagaaacattacagagggtgagagattaggcgttattaagagaaagaagctgaaagaggaagaaatgaccttgccagaccctcagcagtttgacattaaagcttggcaacaaagcagaagttcaccagggagcaaacagctggaatattcacaccagttgtcctagctgtcactgggacactagcacattcttggggaaatccagataaggccccacctgctgggacattagcaggtcttctgtcttgtgtttacagagcagctggatgattaacgcatgtgttgcttacctgagaaatggaatttgagcttctgtcctgggagagagatgagaaaggagagaatatctgtggggctggatgaggcaataactctggcctcatttgcagtctgccttgcaaagacagagagggagagaatgatggggttcaccagctctcattgcatttaccagaaaaaaatgtttgcaaagcccagacatttttcaagggacctgagttttctgcagaatgaaaatattactaactctgaaaaggcttcttactagaaaagtaaaactctccaagctgccagattctttttggaatgagtttgatgtgaaaggtgccttaagatcatctattttctctttagtggccatggagagttcattttctagactctgcgcccacaccatttgcaggtaacaaaaggaggcaaatagcataatttccagcaaacacaaaagtaaaacactgaacttcctgttcttaagaattcttcctgattaacatctccccatctgtgccttcctctttgtgcagcagtcatgcaggatgcttgagtggatctccagagactgacattatcaaaccaatgactcaaagcaggctcatttctccctatgtctcttagctccttgatggttaccctgactcatcccctcaacagtaaccccttagcccttagacctaacttcctcagaagtagatttgtagaagggttgttggttggtttgtttagttgtttttaactaaagatacttaatactgttcccctaggaaccctcttgaccctcttggttagagtgtgttggttctcatcccctcgggaatttccaaatgcattcagtagatgttccttttttgtagaattcatgtcccttaggtatgtccctggtatctttttacttctagaccaatgtctctcccattttatcatgcacatggatcactggggatcgggttaaaatgcagattctaatttgaaaggactgggatggggcctgagattctgcatggttccaggtatggcagctcctgggttctgctgctgctgctgtacccagaaccacatgaaagaacaacctgttggacgtatccagtcttctgctctttccgtcttccctggaacccctggctccaccatttctccttagaaatgctcctcttagctgttatgtttgtgaaagatcattactaggaggcattaaagcccagaaatgccaaatctcctggttgccaatgcagatctgtcatgctcatcagcccctgcccaccccactttaaatatggattgagctcctcccctgtgccaacatcaggcaagatgcagggaggtgatgggttctgaggagctctccttagggagtttttgtgcacttgcagagtcagggacccagaaagaaaaccagatgagagagcaagaagtaaaggacttcagtgcatgattgcactaaaccagtgccacgaaccttcaggaacttgaaaggagactggggatggaacaatcagaggcttggtgcagaaaaagaaactggagctgggttctaagatgtatggagaaggaagcaatgtggagaccagagtgaactcaggctcactggaggaatgagcatggggctgttaagggctaacctgtggagagctcaaagtctatggagaaggagaaaaccaagatattatggctgggtcatttctagagtatcctttagtgagctggtaaaagtgtttagtgatagttctctgcttgtcatcaaactagtgctataattcacaccctttgaggttgagtttctgatcagaaagagctgaaaaaggaaaaatatatttcagggagcatggttcaacacattttcactctcattcttggagtctgtgtcgacttttgagaaggtcattcacaacacaccatgctttgggctaaactggggaatagagtatctgaaaataaacttaacattccaaccatgctaaattattttccaaccctggagcatacaggtgagttcagatgagttcagttgtgtattagcccatttgtgttgctataaaagaaatacctgaggctgggtaatttacaaagaaagtaagtttatttggctgtcagttctgcaggctatacaagaagcatggcaccagcatctgcttgtggtgagggcttcaaggaacttccactcatggaggaaggagaaggaggagcaggcatatcccatgtcaagagagggagcaagagagaaggaaggaagatgccaggctctttaaacagtcagctctcgtgtgaactaataaagtgagactcactcattattgggggtggcaccaagccatctgcccctatgacccaaacacctcccacttggtcccacctccaacactggagatcaaatttcaacatgagatttagaggagacaaatatccaaaccataacaagttctaactgttttttgttttttgcttggttttattttttaaacaaaaaaagctatcaaatacagtgacttgaattcagagtctttaattgaacaagtggctcccatgggctctggacattgaaaaagccagcactgcaggcccatgtgtctattgcctatttatcaagatggcggcaagtctaatgccataaatgctttctcaaaatgaatggctcttggcagttgagaattttgtgtgctcaccaccagcagcaagcatgctcagctctgaaacaggagctgcaaaggaccatcaaggctgtggctagtttgcaaaggcttacctttccagtagctttagatttttatattagtaatgtctattagaggttcagaatgtattggggttggccagcacaatgccatctagaattctgctgtccagaatggtaaccactagccacatatggccacccaaacttaaattaattattttttaattaaaaattaatttcctcagtcacaccagttatatttcaagtgctcaataaccatatgtgtttagtggctaccatattggacagcacaagttatagactattttcacatcacagaaagttctattgagcagctgctctagaaactaatcacatacattgtcttaatatccagtggtgggtggagaatgggcctgccagggtatgagcgaaacatctgtggatgaagagcaaatatgtgtccctaggaagaaagaccacaccagtatgataccaggtggactaagctacataccaacagcacaaacacttggtggccagccacatccctgagactcaggaagaagagggggaattgaagagcatgctttcttctccacaaaagcctccttttcctgaactggcctgacaactccttctcttatcacaagccaaggcacacccctttctcaaaagagccaaggcctccagaaatcttttcagatctcacctcctattactatactttgcttcaagaacttacttgctttgtctgggtacttctaagctattgttttcaagtattttacctgtcacctgcgtttcttctcagtcccttctctctgatgttttgattggactccctgcttggtttgatcttgccttggcctctaaaggtcatttttccaaagtcactcagtgacagctctgtaggcaagtatcctggaacccagcattctagaactcaggcctagaatagttcctgagatgcccacttatctgggaaggaaatgcacacatagtggcagtatcaaaataaagttgtatgtatgagacagctattgctgtgtaacaaaaagcacctgaatctcagttgcacacaagaacgaacatttatttctcacatgtctttcattctggggcccaggacaaaatagcagcggctactcagggggaagtcttctcatggtgatggcaaaaatacaaaaggaaaagtgaactatgccaggcctcctaattttaggctcagagctggcaaaccatcacttccactctccttcagtgtccaaagtaagtcacatcagcatgctcaaaatcaaggggctgggaatcacattctatactttacaggaaaaattatatagttactgaaatagggtgtgagttcacactgtgcatgaccacttatttagatcttgggaagaggaagtgagcaggcagtcagtcatacagctcccactcattgagttctgattttgtggatgagtctacatattatcatttatctattgctatgtcacaaactattccaagatttattgacttaaaacaacaaattttatatagctcataatttttcgggtcagcaatttgagctcaacccaatggaatggttcttatgatctgggctgatcctggctgggtttgtttaaatgtttcaggctgggaaggctgcacctcacattctccagcaggctatcccaggcttgttcacacagtgtagtggagaagttcttgtcataagagtggatgctcaagcccttttaaaacctaggcttggaactgaagccccattacttctattgcatcctatgaattaaagcaagataacagattcaaaagaggaattggggaatagactccacctcttgatggaatgatgatcaaagaatctcagattcttgttttgcaatctactagatgaatcaaggatatatattccattactggaaataacattataaggcttggtccccatccaaaatttaccatatagaggcaacttgagtgacacatattaagtgcagatagagtttggaagatgtatttccttcctcagttactccctatacagtgggacatctttgcttgccctgtcttgatgagacaatgtcaaaagtatgttgaagttatataatatactatgatggcagccagttattgccaactcaatatcataccagcaattcactgggaaaattcactgggtctgaatttactaagaaaatccccatgtatgtccatcgtcagtattaccacctgtcagttcttttctaagggatggagttgcagctgctaataacagctgtcaataacagctgcaatcataaccctaaatccaagtttctatagtttcattctttctgggagccaaaatgactgcaaacatatattttgtcatttattcctactgaggtatgtttattcagaaacagttgggcacaagtgaatgcaagtaataactccctaaatatatatatatctttccctgaagtcccagtttcccatttcatcccatcaagagtgttaatgcaacactttctcttacttcaggcattgtaaatctattcatctgattcacgtttcttttggattgttcctttctccacctttattgaattctatttttcttcctatttatctaggggcatagtttattcatttttcctgagtttagcccacctgactatggctttatagcctgtttgtgaattggttttagtaataattattatattttaatattacttggattcataaaacattaattttcaacttacagtagtcactaagtccaatcaaaatccatcagaattcagatagaaaggaaaccacattccaagctctatagtaagacttgacatgatcctgctcatctttatgtcagtccagaaagaaatgcattattacttccatgtttcagctgagaaatctgaggctcagatcagggaagtaccttttctatgttccaggataggcatgaagcagaccaagaatattcttatcatttttcctgatgatgaaactgtgatgtaagttacatatagagaaagaaattccaatatttttctaaaagacacttatttttgtacattgttattgaaggtgacagaaaagggtgttgagttgaacagaataaaatccacctttagagtaactatgcaacttatttcaagagtaggtgaatatttcttggtcctattctcctgggttctaagtagttcttcccaggaaaacataagagagattacgtttaagtagttagtgcttccttgtaaatgtatagtccttaatgctggtgctctgtttctaccacagcctgaaaaatataaaataactctagtggctttgctccatctcataagcatccttatcaccaagtaccaggagtaagaatgagcagtgtagatgtggaggaaaaacatttgttttcatgatcttagtcccccagttctactgaaaaggccttgggtattttgattactgacaatatacctatttgatcattcctcatcccttgcaaaatgaatatgggctgtcacgtagagccagttgaatactgtgaaaagatcacagtggaaagtcttaagggcgaccttggacaagaacctggattcctgcttctaactgaaaacatcctacaaggttatacaaactggtaggaaatggctgacctactggagatctgcagattgatcaggagcgaagccacttagagcgtatcagattctcttgttatctgcaaagcaggagtgagtcatttcattgagctgttggcatgcaacaggcacttaggaaagatctgacgaagtgaaagtatccatttgggacccattctattcaaatatgtgcctaccctcaagatgcatgtatctgtctgtgttgtttcttagaagtggtacaaccgcacataagccattcttcccaaccactatcttcttcattttaacatgtaaaaatattgttattccattatgtctaaattcttcattttcttgactctcctactatctccatagtatttccacatgtaagatgtaggcttttgtgagaaaaagagaattcctttaatttgtttcagcactcattaacctaacgtgattcttgaccattctacatggaagtctacttacactttccatggacacaaaggaaccttgattcttatatttacttggcagatggactgaggatggggggaaaaaaaggcacagaatgaaaacaagtaaatattctggggttcagggagattatgataaaataaataaaggaacaacaagctgtaagaagaaaagaaaagaataagtcatgcctgatcaacattattttaattgttccactacattaattaatggaaggaggaacaccatggtgcccacccttgagaagaatgttctgttgagtgatttgtgaaacatttaactatcacattcattgaacaagtataaacacagagtagtaataagtgacaaggattctataaggagatgtatattagcacaggtaggagcaaatttgaagtaatttcgaggaaaatgtaaatcagtcactgagaagaaaataccctcagctgggagttgtggctcactcctgtaatcccagaactttgggaggctgaggcgggcagaccacgaggacaagagattgagaccctcttggccaacatggtgaaaccctgtctctgctaaaaataatttttaaaaaaaattagccaggcatggtggggcacgcctatagtcccagctactcgggagactgaggcaggagaatcgcttgaacccaggaggcggaggttgcagtgagctgagattgcgccactgcactccagcctggcgacacagcgagactccatctcaaaaaaaaaaaaaaaaaaaagaaaaagaaaaaagaaaagaaaataatctcagcctgcagaagtgagagcactcatatcactgatgagtagagagagcatcagtgatttcagcaagatggtggaacaggaagccccaggtccttcccccatggagacattaacttaacaacaatgtataaaccacattgcctttgtgagaacatcagaaaccagttgacaggttacaggaccccaggtgagtacaacaccaagaagagacacattggaggagggaagaacatttgttggacttacctactatatcccatcctccaaactcatggcttctccttcaggaggaaaagaaaaaggcagaacatgcacccaatgcctggattttgggggtgcttctcaggggactggttgctttcttgcctgacctagaatgctggtggggaaacagcacacttttgatacctgggggccactgagaaccaaggcaacagttctgcttgctacaccactaccagagaaattaaagcatcacagacagacaccagggggagctactgagtagaaacaggcacaccacttcagctgggaaattatacctgtaggcccagagatgatgcaaccgctgggaagatttgagaggcctgcagaatctctagtggggctaattggagaagatgttccctgtctgaagacagtccatagagactgggagaggtgtttgttttttcaaatgtccacatatcaacaaaatatcgtaagacatacaaaacaacaacaacaaacaaacaaacaagaaacaggaaaacatggcccaataaaaggaaaaaataaattaataaatctccagtaactgacccaaaagaaataaagatttatgaattacctgaaaaagaattaagaataaccatcataaaaatgcccaatgagctataaaacacacacacacacacagacaactaaatgaaatcaggaaaacaatatacaaacaaaatgagagcatcagcaaaaagaaactataaaaaagaactaaacagaaaatctagggctaaagaacaataactgaattgaaaaattcaccagaagggatcaacagtatactgtatcaagcaaaagaaagaatcagcaaacttcaagacaggttatttgaaattatcaagtcataggggtaaaaaacaaaaaggatgaagaaaagcaaagagctattaagagacatataggatacgatcaagtggaccaatgtacacatcatgggagttcagaaggagaagaaagaaaggacagagagcctatttgaagaaataatagccaatatctccgcaaatttgaggaaggaaatgggcatacaaattcaaggacctcatataactccaaatacaattaatccaaagagaccttgccatcaaacacactatcatcaaactgtcaaaagtaaagacatgaatcttgaaagcagcaagagaaaagtgatttgcctcatacaagagaaaatccataagattatcaatggatttctcagaagaagccttgcgggccagaatggattgggatgatatattcaaagtgctaaaagaaaaaactgacggccaagaatactgtgcagaaaaactgccattcattaatcatggggaaattaagattttctcagataaataaaagctgagagagttatcaccactaggcctgccctacaagaaatactgaagagagaccttcaagttgaaacaaaaggattctagaaagccaaacaaaagtatacaaaaatatgaagctctctggtaaaggtaaatacatacacaagtatagagtcccatggtattgtgatgttagtgcaaaatcacttaattctggtatagaatttaaaagacataggtataagcaataactataaattattggtgagtaaagagaaatcatcttagaggcttagggcacaagagatcctatgaaaagccactatggctattctcataagagattccattttgagcaaagttgcccagatggagatgagggagattgtcaaagtttaaaacattatacaacgttggaaaataagattaagacagctagtaactttgaagatatctgtttaataatcacattaataacagtaagtttggagacaacaagccacccaaattctcatgagatccatctatgtttgacttaaatgatcaaaatgacttgagatatatgaaattaatttgccaagtctatttctgtaatcttcaggtcatctgctacttacactgaccaggtaactctagctttgttttgaaagaaggtctgatggtgaaattaaataacaagttaggatcaaggagaccatttgagagagaaaaggatctaaattctagttctagaatggaatcccagacataacatataactgaccccaattattctttagctaaaaggtatccttttctacaacaggattgcagtcattcttttccaattgactcagcaatatataacctcattttattatttaactttattttcatagctctgacataagctaaactccatttaatccaaaaggatttttaaagtgtctatactggaaaagactacaatggaaaaggactgactttgtacctagagcaggccaggatgaaaacataccctaggaccagaacagcaaggagggatgggtttcaatggatggtgctctgaaaacagcctcttgaaatttagatgctggcccttgaactaattgtatgggtggagcacgttagctgcttcagaataaaaaccaattatattaacaaccaccctcattatgcaggacataatcaccatgaccatgtcaatatgtgtgtggaatatggattttaagtattttattatgaaagtattgtgtgttgggcacagtggctcatgcctgtaattgtagcactttgggaggctgaggtggacagatcacttgagcccaggagttcgagaccagcctgggcaacatggtgaaacactgtctacaaaaaagaaaaagaaaaaaagaaatacacaaattagcgtaggctggtagtaccacatgtagacccagctacttgggagactgaggttaagccttggagatggaggttgcagtaagctgagatcacaccgctgtgctccagcctgggtgacagagtcagaccctgtctcaaaaatgaaaataaaaagatattgtgaatattttgcgaagtgttgtaaggacatatccatcaaagaatgtctaaaataaagccaaaatacatcaacttttatttttttttaagtataggtgctccttgacttatcatgagattacattccaataaacctattgtaagttgaagatattataagttaaaaatgcattttctacatctaccctatcagttgtttacactcatggtcacgtggctgactgggagttgtggctcactgccaccgcccagcatcacgagggcattgtactgcacgttgctagcccaggaaaagatcgaaattcaaattttgaagtgtgcttcctactgaatgcttatcactttctctccctagtaaggtaaaaaaatcttaaaccatcataagttggggactatctctgtatctgtgtgtatgagtgagagtgtgtgtgtgtgtgtgtgtgtgtgtgtgtgtatgtaaccacaattttttaaaagtttttctaaaatgtggacttcagactctgggaaatgtgagtctggctctgactccgctgttctcaactgtgggaccttgggtaagtctttctgttgtcctaagcctctgtttccttctctagagaatggcagtaaccacacacacctacacaggattgttggaagagttagatttgtcaggctcattaaagacactcactccccatgcacagcctcaagtgcagggttttggcgcaccagctggcctaaggaaagcaaacctttcttctctcaggaaaagaattggaacccctcctttagaacactaactgtgcatggagtagctggagtcggcagcacctggtgcctggcatgcgaagttccatagcagggtaggtgtattagcttcctatcacctctatcacaaattaccatgaacttagtggcttaaaacaacccaaattgactctcttacagttctggatgttagaagtctaaaatcgaggtgtcggtaggaatgtattccttctggaagcttttggagagaatccatttctttgcttttctcagcttctagcggccacctaccttccttgactcgtggcctcttccttgtatcactccaccctcttgtttccatcatcacctctctcactcatccctctgatcctccttcttccctcttgtaaaggacccttgtgattacataaagttcacccagataatccaggctaacctctctatcccaacatccttacttacttctgcaaagtctcacttacaatgtaagctaacatatcatcagattccagggattaggatattcaactagtcataccaggcactgtgtttttataggagaccatcaaacagattgtatacaccaccactgagctcagcacaagggaaaaagaacaactctgctgcagaataggtgtccctgacaacagctctggcatgctgaaaggctctaggcaccccgtcctagaaagtctattaaacaatgccaggcctggtcctccaactcttagggctgtttgaattcaagaactggaccatgtagactttgcctcctatgcagaaatttgccttcacagcgagttgtaagctcctacaagatacggacaactttccattttatttttactacttgagaaaaatagtttttttaataaaatgcatgtaagcatggacttttgagtcattcagctggctccattgctgggcatgtgcagatttatcagtttaccatgatctttggctttccacatctgtaaaatggagacaactttatgtagcatattcttagtcagccagggctgacataataaaataccacaaactgggtggtttaaataatgaaaatttattttttcacatttctaaaagctagaagttcaagctcaatgtattggcagagtttacttcttccgaagccttcctccttgcattgtagatggctgtcttctccctgtgtcttcacatgatcttcaccttgtacatatctgtgtccaaattcattcttataagaatgccagtcgtggccgggcgcggtggctcacgcctgtaatcccagcactttgggaggccgaggcgggcggatcacgaggtcaggagatcgagaccatcccggctaaaccggtgaaaccccgtctctactaaaaatacaaaaaattagccgggcgtagtggcgggcgcctgtagtcccagctacttgggaggctgaggcaggagaatggcgtgaacccgggaggcggagcttgcagtgagccgagatcccgccactgcactccagcctgggcgacagagcgagactccgtctcaaaaaaaaaaaaaaaaaaaaaagaatgccagtagtattggattagggtccacctaatgacctcactttaagttagttccctctttaaagactctatctccaaatacagtcacattctgaggtactgaggtttaggaccacaacttatgaattgggctgggggaaaggcacaattccccccataacaagcacccttcttaaggagttgtgtgagaattacattaattaaagcatgcagaggaaagtccctagaatgatgcctggcaatcataaatattcaataaaatgctgctgctgttactgtttgtaaaggaagttgtccaacactccctcccacctctttctatatctgccataaaatagttcacatgtttataagaaaaaaaattcttgtgccttccatttcttttcaagttccctactcagcatttatttttataggcatggccattcctaaatactgagacatcgccagtcaaaggggaagcattttcagcttgtgctccatggtagtggtgtttatgtgctatttaaagggaagctgcctatctctttgaaatgcttattatcaaagcatgcctgagtcaacttttccagtgcagtaatgctggctttgattttcacagaccacttttgatatgattagctcgttctctcccactcctgggagccagcatcttctcatttacagatgctagttgcccagcggccaccagaaattctgctggggagactctagttcatttaaggaggaaacaaagggctttaaaatatatagatccaaagcactcctacagtgttcatcaaaaggcttgtcccaaaatgttcatatcagttttaataataataatacctcaaaaccagtaacattccaaatatctatcaatagggaaatcaatgaacaaatctaatagtgctcaacaataaaaaagagaaaattattgatacacataacttaaatgaagctcaaaaatatgctgagtgaaagaagcaagcacaaaagtatacagtatgattccacttatatgaagttctagaacagtgaaaactaatctacagtgagagaaatccaatctgtggttagctgggtggggatagatgaggtgattgactggaagccgggggggacacttttctgtgtggtagaaatgctctatgtcttgactgaggtgatggttgcaggggtatacaacatcttatatgaataaatttcactgcttataaatgataccgcaaaaattttatttaaaaaccaatcaacaaataaaacaccatccaaccaagatagaagaaatttaattatcttcacagtgcgtatgtttaggaaaaagatatttgactacatttttcatatttgtgcatgctatgtcatagacacagcctatttctaactcactgatggctgtaaaatgtacccaacttgagtagaggatctatctctttctgtgaagaatctcactgctggttctcagaacagacacttacctcccctgactacaagctcgttgaaataacagcctgatacacaaaggggagggatgagtccatcattgcccagataccaataatgcatagcgagagtagtctagagtttttaatgaatttctagagaacagaaataagatgtggttgtattgatccagagtatggaaatccttaaactaaaacacacacaggaaaaagctgaagtggggatgagggacatgaatcctagagggtctctctgagcttaaagcacagaatcagaaaatttggtgtgtgagtaggttgatgaagaaggagtaatcagggtaattaattaaacaaatctttgtgcatcaggtatctattgctgtgtaactagcaaccccaaacttagttatgtaaaacaaccaccacataattcttctcagtgattctgtgggccaagaatttggacaaatcacagcagggatggcttgtgtctgttccactggaaatactggaatagctggaggtgacgtgaatgactggggctggaatcatctggaagattcttcactcacatgtttggcacctggattggggtgactcgaagactgggctcatctaggactatcacctggagcacctttgtatgttcactctatgtggcttgggcctccttacatcatggcagcctcaggttatcagattactttcatggcagcttagggctctgagagtaaatgttccagaaaataagaaagatcaggccaggcgcggtggcttacacctgtaatcccagcactttgggaggccgagatgggtggatcacaaggtcaggagatcgagaccatcctggctaacacggtgaaaccccgtctctgctaaaaatacaaaaaattagccaggcgtggtggcgggcgcctgtggtcccagctacttgggaggctgaggcaggagaatggcatgaacccgggaggcagagcttgcaatgagccaagatcgtgccactgcacttcagcctgggcgacagagcgagactccatctcaaaaaaagaaagaaagaaagaaagaaagatctcccaaggccttttatggtctcacctcaagagtgatgtaacaccatttctgtcatgctctactggtcaaaaagtcacaagtccacctttattcaagaggaggatatataggtccccaactcttgacgagaggagtgtcaaagaatgtgtgccatatttgaaaacatccatccatcgaataaatggatcagttggtccttgctcatcactattaatagactaatggctttcccaagacagtaccagaaagatgctctttaaggcaaaagaaggtatgtctagggaggtttgtaactgagagagaaaaaagggatgtctttcaactttcacaaggttcaatattgcagaggtctaaccaggagccaagcacacttaagtattacattctctcttttattttggcttttgagcctaccacactgaccacacaccctacagtgaagcttgccagtctacacatcctatttacctccacagagccagcaatcagccttcctgtttggaggaatttgggcaaatagacctatacacctgcaaagaacactcacactagctgccacatcactcatcctggccactaatccatatgtataaggctgcttcctcaggctaccaggcatctaaggatccttcccaaaggaaggaccaaaatgggtaaacagagcagctgtctaccaagtaaccgaagataattccagtaatagaaatcaacttcttaaaagttttaattagtattctcagagagcttcacagggatattgaagccataaaacaagaacaagccgctatttaaaaaagaagaagaagaagacggcagtaggagtaagcagtaaaaaagaaattgttggcctggcaccgtggctcacacctgtaaaatcccagcactttgggaagccaaggtggtggatcacctgaggtcaggaattcaagatccgcctggccaacatggcaaaaccccgtctctactaaaaaaatacaaaaattagccagacatggcggtgcatgcctgtaatcccagctttttgggaggctgaggcaggtgaatcgcttgaacccaggaggtgaaggttgcagtgagccaagatcgtgccactgcactccagcctgggcaacagagcaagactctgtctcaaaacacaaaaaattgttcttaaaatttttaagtgtggcttccaaaatgtaaaatataatgaaaaggaccaaaatagtggaattgatatggtgatgaccaaaatagagacttgagagacatacggaatatttttttaaagatgatgtttcagataacaggttctgttttatcttaacataagaacataatcttttgaatagggagtaggccagcacattgaatccatacaaaaatattatgttcctagcacactatttggctccacagtgagcaatattcgcgtactggtagtaataatataactgctatttatcgtttaatccacatttaaaggaatccttagataaggcatagacaactgaaagaggatgacggattagaatgtaaatgttttcagtgttgacaatataagaatcaagttatatctaagaaaagattaaaagtggaagatggagtgaggaggtggctggaagataagaatgtgaacatttttgttctacctaatatggaatcgagagatactcccgaaagctaatggtatgtgacacagaggggaaagcttcaaagatagtagtcctaataattataactatcaaatagattaggagtataagagaatgcaggacataatataaattagctaaaccttcatttttcttttttttaaattttatttacatgtgcagaacgtgcaggtttgttacataggtaaagtgtgctgtggtggtttcctgcatctatagacccatcctctaagttccttccccctcatcccccacccctctacagaccccagtatatgatgttcccctccctgtgtccatgtgttctcactgttcaactcccacttaggactgagaacatgcagtgtttggttttctgttcctgtgttagttagctgaggatgatggctcatttttcatagtgggattcaatagatgataccaaaagtagataaatctagaaaggcctattatgattcttttatttggcattatataaataagaactaaaagactccaaaatgaaaataaataaaagtgtataccgctgggacataggagggatgagacagggaagagttgtttttcattatcaacccttaagtattatttaatttcataatatgtgcaatttaattttattgaatatgggaataaagtccttaagatacccacttgaggaactcattttcaaatacccaagaaaggaggagtggagtgagggagaggagaagcaatgagagtagctgtcacttatcatacagactttattacatgccaggcagtgttctaaacctgttacatatgtcaatgcatttgatcctcataaagaccttgagagggtgctattattatccctatttttgaagatgaggaaactgaggcacagagacataattaatagcttgctcaaggccagacaagtagtagtgtgtccagaattggtgggttcttgctctcaatgacttcaagaatgaagccacagaccctcgcggtgagtgttacagctcttaagttggcacgtctggagttgttcgttcctcccagtgggctcgtgggcttgctggtttcaggagtgaagctgcagaccttcgcagtgagtattacagctcataaaagcagtgtggacccaaagagtgagcagtagcaagactcattgcaaagagtgaaagaacaaaccttccacactgtggaaggggaccccagtgggttgccactgctggctccggcagcctgcttttattctcttatctggccccacccacatcctgctgattggtagagcccagtgatctgttttgacagggcgctgattggtgcatttacaatccctgagctagacacaaaggttctccacctccccactagattacctagatacagagtgtccacacaaaggttctccaaggccccaccagagtagctagatacagagtgtcaattggtgcattcacaaaccctgagctagacacagggtgctgattggtgtatttacaaaccttgagctagatacagagtgctgattggtgtatttacaatccctgagctagacataaaggttctccaaggccccacaagagtagctagatacagagtgtcgattggtgcattcacaaaccctgagctagacacagggtgctgattggtgtatttacaaaccttgagctagatacagagtgcccattggtgtatttacaatccctgggctagacataaaggttctccacgtccccaccagactcaggagcccagctggcttcacccagtggatcccgcactggggctgcaggtggaggtgcctgccagtccggcgcgctgtgcagccgcactcctcagcccttgggtggtcgatgggactgggtgccgaggagcagggggcggcgctcaatggggaggctccggccgcacaggagcccatggagtgggtgggaggctcaggcatggcgggctgcaggtcccaagccctgccccgcgggaaggcagctaaggccaggtgagaaatagacagcagcgccggtgggctggcactgctgggggacccattacaccctccgcagccgctggcccaggtgctaagcccctcattacctgggccggcagggccggctggccggctgctccgagtgcgggggctgccaagaccacgcccacccggaactccagctggcccgcaagcgcggagcgcagccctgattcccgctggcgcctctccctccacacctccctgcaagctgagggagcctgctggggccttgatcagcccagaaaggggctcccacagtgcagaggtgggctgaagggctcctcaagtgcctccaaagtgggagcccaggcagaggaggcgcggagagcgagcgagggctgtgaggactgccagcacgctgtcacctctcagtagcggtaatgcaggcacaagtgtgtcatttttttatctttcctaacaagacatcaatacaaaacaagatacagaagtggaagcaaattattaagggttagtttactgacacctgaaataaggaaaaggagaaattttaagaatgctgacccctggtgaggaaggctggggtgaggcaaggaggggccagagatttttttacttttattttatactcagttgtcctgcttgattttttttaactgtaattgtcaatatcattttttaagcaaaaatattttttgtcacacctgtaatcctagcactttgggaggccaaggagggcagatcagttgaggtcaggagttcaagaccagcctgcccaacatggtggaaccccttttctactgaaaatacaaaaattagccagatgtggtggcggatgcctgtaatcccagctactccgaagtgtgaggcaggagaatcacttcaacccgggaggcgaaggttgcagtgagccgagatcatgccactacactccagcctaagtgacacagcgagaatctgtttcagaaattatatatgtatttttatttttatgtcatacaaaacctacaattatcactgaacttttaagttaaaatcagatagaaataggaagaaattgataaaaacttaatttatgacccttttgtctcctaagattggagatacaatttgtatgtttgcatgacttttgcaaccaaatgcacccttaggaaatttgacttaaatattttattatgtcaggtgtttgcttcatttgaaggaaaacatatttaaattttcttgccagtacttctattcagtttttaaagtgcagtaattagattttaccagtcttgtgcataagatacaaagtgagactatctgacttttagtgccacaccataaaagactatatggcttctgcctgttctcttgggacacttgcatttggagcctgagcccccatttaagttgtctgattaccctgaggctgccctactaaggaagccctggcctcaagttcagcccatatacccatctgagatctctgtccacagtcagtgtcagccacccatcattctggcaaaaaaaaccttcagatgatttcagccccaagcctctgagtcttcccagctataaaattaaacccagcaattccacacatcttgttttatgctgatgggactctcaaagtaaatttttattataaatataaaagggatattaaaacagatctgctgtataagcagagatggatagcagcgctgctggtgtgtggactctgagataatcctgaagcatgtacaaaatgcgctgtgacttctcgaaatctcatccacacggatggggctttcttcactgttgtgtgggactggggagtgctagggtatttctcattttttattgtctcacatctattagcctcatggggtgcagcaggagggagcagtggtctcagtccctatctcatgttagaattactggggggtatttttaaaaccccagtggctgggccacagcacagctcagctaaatcagaatctctaggggtgggacccaggcatgagtatttcataaagcttctaggtgattccaatgtacagccaaagttgaaaaccagggcctccctgaaagagtttgattcagaaggtctggggtaggtgggcccgggaatctgtacttaacaaagacacccaggtcattcttacaatgatgtaagttagggtcttacctcaacaagggactaaccatgtgcactctgcagtaagtcagacctggctcaaaacgtagtcctatcactttcaaactatgatcctcactaagccttagttttctcatctgtgaaatgggaatattaaaagtttgtaagaaaaaaaaggcatgtaaagtgctgagcacagtgtttgacacttaagaaccaattgttaaatgttggctcttgcagggagaggcttcagcacaggccatgacctcctggaaaacaagaggttcctgacagccccatatcattcagaggggtctgttcttccctaggaatgagataagattctatagctatttgcaaatgttcactgttccttatgtatatatgcacacagtaatcttttcattccgaaatcttaggatcttctcatacgtttttgcacggattcttacacattgctgagcatctgttatggataaatattatcattccaggtggaaaactgaaatgaggaagtgcataggcagcactcttgatcacacagtacctgaagggtgaaggtgaagagtagctcaggcttccaggccccacacacaccctaaaatgtggaggaaaatgaaggaggtgaggctgcacatggaacccattctcccttgtctcagccttctctgcacaatataagcacatatttttatcactgtacttcctaggctgcaaattgattacctttctgatcctgtgaacagctaaggtgctaactacactctgctgagatggtcttcatttgcaagctgaaaatccacataaatactttgataacataacctccccctatgtttttgactaaaaaatattcagctccttaaggaagggttctttgttggctggttgacttattggctgccttagtcacccaattctctcagctctcttctttattgtccaacacagatcaaacctagatgtgttattgatgtggtactttgttttaattctcaatttctttaatgcaggggggaaatatcttccaagcacacattaaagaaatgtccttgtgttcgatttgccctggctgcagaattgattcatgagtgtcacctgctttccctaccctgagtcacagaaattacttaaaatagatcgtctgaagatcagttggggccagatcagccacacagtcatagcaatcagtatccttgagtataaaaatatcactgttcactcctaagagaagacggtggccggcatctgcacctgagggggacaggtgcttctcttccaacctagagtgcacaccaaatatgcagaagggttttatttggggggttgggaggagtcacccacatttttaaacgcatgctccattttaagccagattagctcctgatactgtgaaagtccccttcattgccaaacaccaggtagaaatcttaattttaaaagcacaatcaactattcttcttcgttgttaattgatgaaaccagaaaaccttggatccttcccgatatgaaccagaaatttccaaatccatgtccaagcctgcgaattgaaaaacagctggctcttctgtctttctatcctctttgttttagcattttaatttttagagagatgagagaaatggagcatctgtcccctgtgattctattactggctctcctaacaccatgaaaaatatcagcttctgcattctgataatattatagacatcaaatgccagtgtaataatgtatgtaattttaggcagggtcttacttccaaagcttaaactcagatgcatagtcttaactgtctgatttctgaactcacctggtaggtattcacttccatttttgtcagcacttcaaatgtaatgttgagtgaactccacactattttggagaccaagtactatgatggtatattcaggtcaggacaccaaaagtgttcctcaagttagagattgctcttaggttttgtaattcataaaacaaggaaatatttgctccctacatagctctagctactaatgtgacaggtatacattttaaaataaattcagctccactctggtttggacttctttataccgtggaaggaataggagagcttggggggagcaggaattttctaacatggttctatccattatacaaaagggtgatttcccccagcatcttaaacagggttgctgctcaaaatagatgaagtatgaagccccaaacaagtggtgcttctaacttgcagcttcagcccacgcacagagtcactaggtgtcccaaaggtcccagatgactctctgtgcctgctgcatcgcgtccagatcccacttctcacggggagggccgtggacctcctccccagcctctcactctttgcatttccagtttcatgggtgtgactcagaccctgaattctctgtcctctaagccagcaggactcacactacaataaacccttgagtcacctgggcacctcggcagcatacaggttctgatgcagcaggtctggagggaggtctgagagttgcttttctaaccagctccccggcgatgctgataccactgtccccgtgtctttggggataaacagcaggaggcacacacttagctgtggggagattgtctgttcagtcctcacagaaatgactccagttctgcactcatcagtctgagatgacagaatgaatattgtgagccactttaattcttcctgcaaaactgtaaatatagccaaatttctctctatgataatgaattaaacaaatagcactcttaatcaaaatctacagataaccccaaacagtgtttttgccattagtttaacctcctccacctgaattcttatcaatatagccagaatgggctgagagcccatttcctcctgcccccttctccaggggaaaattagatgaccaaatgccaagaactgaaaaggagtagaacctcagggcttccaactctgaaaactagattagggagtgggtgagcataaatgagaaaaaaaaatacatctttattttcactaagcacttttatctagcatttggtcttattatacatgaagcaacaaccatagccacatgagctgtatctgtgatgtcgtctccgatagaaatgtgagcaattgcgtgctggattacagtcaccgcagttatctcagagctcttctcattcatcactacttcagagtgaatggctaactcttcttataataaagaaatttactggctcttgttaataaggaaacacatatattaatgaatctctatttttcaatgttttgatgactagatttcaataaatcagtttcctagtgattctattatttattgtatgccttttaacacactattctgcaaagggatccacagagtgtcaggggcgcatagcacagaaaatgtttaagaaccccagagcatcatgtcaaatgttgaagagatggcaactgattgtgttcagcattgttgatgctaattaatataattattttagatcagggatcacagatgcatattcctgcaaggctcagctatatagaataaataagtggagtggttgggtctaaggacaatcctagcagaaagagagtagtatatggcatctgactcttggccttaggagttgggggcaatgaagaggtgggcgatccatgcaagcagatgaatgcacatcccatctatacagggcaccgctgagcggctccacagtgacacaagttgcctggtcttcagatttttccaagagaaaccaaaagtcttgatgttgtggacatcccccctaaaaaaaaatgcaatgtacactttagcaactatttcaactaacaagaaacaaagaaaaaattctaatcaggccaaacaaccaaaataaaacaggggctcaggccgagcacagtggctcacccccgtaatcccagcactgtgagaggccaaagcagatggattgcttgagcccaggagttccagatcagcctgggcaacatgcaaaaactccatctctactaaaaatacaaaaaatcagcccagcgtggtggcatgtgcctataatctcagctacctgggagactgagatgggaggatcacctgagcttgggaagtcgaggctgcagtgagccaagattgcaccactgcactccagcctgggcaacgagagtaaggccctgtctcaaaaaacaagaaatatatagtggttaatatccagcataagataaataggcaacatagaacaggttcaacttgccctttgtcctaaaaatatttagtccaaaatcactaaacttccaatcttgtgcttatccaaagaaagtcaaaatagttattttaatgaacacccaaaatctaataagtatggttactaggtttatcaaacaaaaatacagtatatcacattaaattttaattttagataagcaactatactatttttagtatactgtatgtcccatgtgatatttgagatatgcttatctcaaatatccaagataatttttatttgtattaaaaaatgacttggtgttttcttgaaattctgatttcactgggcttcctgtatcttatctggcaacttttataataagccaaccccacattgtgatggagtaattactattaaaattaatgtgtaatgttaacaacgataacagttaacattgtaattgcatttgtgctttgtttgaatagcgtttttattgaagcaccacatacacttaggaaagtgcacctgtcctaatccagctccatggcatttcacaaagtgggcacacgtggtagccagcaccctgatcaagagggagaacagtcatggcctctgagagcccctcatggcctctttcagacactagccttacctccaggggaacactactcctgatttaaaatggcatgaattagtggtgcctgcttttgagtcttatacaaatgtgatcgggttgtactttaaaaattacaaaactctgtgtgtgtgcgtgtgtgtgtgtgtgtgtttatgctttctctgaatattggattactgtgtaaatccacatttttggttagacagtcctcatgccccacccgtggcttttcacccttaccagttcagttcccactggcctgactgccaacagccaaaacctgcatttctttgtctgggagctcctcttggtcacaaaagcccacattttctgcccttggggtaggaggtgccagagaatttacactcctaggtgcagctctcaaccaatgaccgatggaagtgggtggattaataccccagctccctctcctctcagaggcatgttccatccacatggtcccccagagatccccactaggatggagtcccagttgcccactgccatgacttggttattatcttccttccaccgcctgcctcacttccccactctcctaacaattatcctagaatcacctcccaagataaactatttgcactcaaatctgggtctgtttctgggtgaatccaagctaatatatttggttaaattaaattaccctaaatgtcctacatttattcaacaaatttgtatcaagtacctagtactgccaaatgctgtgccgggtgctggcacatcaatgcctggcagtgaatgcagatatccttacacctggtacccagagtgggcgaagggagccaggggcactgcagggaacagccctgtggcctcaagtccagcattttcttccctacagcagagctgactccctgtgaattctgatgtgtgggggaacactctgaactaccaaattttgaaggcctagcaggcaataacttacacttaacatgaaaactgcacataattttgtggatgattgagaaggcatgtctgagtcctgaggcatctccaggtcattatgagcatccgtggttattgttcagcaagatcaatgaagagcactcaagagattattctatgtctgcactgtcctgatatggccttgtttttatttaaatctgtctccactagaagcttgtttatttgtcatttgtttttctcacacaaaactagaactcaaaatgagttttctttaaaaaattagatttaaaatgtgaatttattttgtgttcctggttgggaagattaataagcagcagttcactgtattttgcaaaagcgtgtaattgtctttttacatagcccaattattactgtccattttcgatagtgaacttctagaaaacaggagccatttgtatttcagtgatttttcccggcatagaagttttttaaaagtgtacttcatgagcagacagtagtactgagactgccctgtgggaggaaaaacccacatcaggcctgtctgaacttcagcaccacttggtgtcctcagatggtttcagagacaccccagagccccatcctcactgcagatcaggtggctgtgtttcctgagatgagaattggctgtagaaattgtgtcagctcaaaagcttggaacaaaactcatgatttctcaaatcccttttccatgaaatttgtgtgaaataacaacatttctcacagacactaacagttttatgttttatgttgtgtaactattatgttgttttgtttgcttcaacagtttttttttttaaagcaaatactcacaaatcgagaatatttgtgcctttttaaatgtgccggtaatgtcaggttatattgttcatcaagaaaagttatcataaatattatataatattacagatacgcaatctatcttcatatatactatatgtatattatcatatataaaaatagctgtatatagattcacaatgcatatctgtacacagaaaatatatggttttatcataaacaattacttttacctcctagagggagccagaattccagaagagaatgtgttgttttaaaagtgtgaattattttttgcattatgccactctgaaactaaatgaaattataagaaggaaactgaagctgcatattcaatagagaatgtgtgaatgcattccataaatagaaaaagaaatatcaagatgaaattccagctgggtgggattcctaaagctatagggggaaaatagagtctctggctgaatctgtggaggagtggatgggcttctgtaatctgcaccatctatgttattgaccagtgaggtcaaggacagaattactcactgttggttttctactgggatctctaatctggtctcttagccagagtgatttgactttcttccctgcaatcattttgcaaagggctacagaaggtgacctgtcttctcatcaacctactgtggcttgggggacacctgccaacagatgcaaagagcctcccatttgatgcagagatgctaacacgccccctctgccaggaaatgtgttcagggctgagtcacatggtttccggtcttcatctagagataagtgatccttcactgagaggcaaagggaaccacatggagcccagaagacgagggtattcatgtttgtgaaacagtgaaacattcaaccaccaatgagctgtagtggtgttttatttttgtaaattgaactggccaaatggacaggtagtttcagtgtttatttaactgattctctccctcctagaatatatccatatctagaatatatcccttccatatctacattcctatctatagtttttatagtaactctttttttgctttgatcacttacctcgattctcttgaaagcagttaattttaaaatgtagctgtggtcactgttttttgttttttttgtttgtttgtttttgtctctcagccttcaactattctcttttttggctacaatttctattatacctgttctaatggctacagtagtgagggagaaaggaaaatccccatgggaggcagtcgcaagtgggtgcctgtttttcacctttgcctgtagtgaagcattgtagtatagtgtctgggaacagggacccaaggcccaggcttcctggattcaaatcccaaactctttcccactgctggtattaccaacctggcttagtactcaacttcatcaagatcaggtttctgggaaatgagggtaagccaaatggtattgggcctctgcaaggatacagaacccttctaaaccctcttctttgcaggaagggtcagataaatattgcttttgtggtgaatggtggtgtcagaaaggtaaatcagaggtgggcatgagttcacgatcacagatctcactgtaagtaccatagaattgtgaattatttgggtgtatgcctttctaaattccttctagagtgtggaaagaattctttggtttgatgccttcttacctgtgctccagtttgtcacctctatgcaaaaaaaaaatgattttgctaagggtaggctctgaatatgcggctgaaatttgattacaatccagacattgaaaactattctatttataaagaagagaaaggatatcactatccacccacatttgacatctagacctagtgcaagatgcatttcttgcagaagtaaaactaagtggataatttgtgatatattttcctatttttattaaagttatatgggcacagagcttaaagacgcaacccactctagaaagcttattatggaaaatagccatcttccagtcccaccatcaccatttccccactcttctaaggcaactgctttccattagtttgcctgttcctgatatttgctcaacatctctaaataacctgcttagatgacagctacttgattttttcagttaccggcattctccattgaattcacagtatagaagaggagggtttacgtctcttttagcccccccttctcactacccagcccccatcttcccctaaagaattataagtttggttagacaatattctgcttagtttattattactatacaaccactcttcatagttgagccattaatacacaatggttcatcttctttggagcacagttctgtgtttaccttgtggcttataattgtcttttttattgtttgcttgcttagttttctatgttctattcttagagctctccaatcttctttctgtacgttcaaaattatcaactgtttcatcaattttgtccttctggcaacattttttctgtagtcttctgagtcactccagtctggctaggttgttctctaagcctgctgtaaaagtttcattttggaatttccttttatcatccttctaaattctcccttcactgtcattctagaaatcccctttaattatcatcatagattctggttgcttggtattatgttttattgtaacataattatatgtaacaagtgctttactcccttattttggtggagtacattctccagtagctttttcagaaaggacacataggaggcaaattttttgagacaactaaaattttatttttattcttttctcatttttaattaataatttgattgggcatagaatttcaattgttttcctttctaattttgaaggcatgactccattttttgctagctttccatgtctttgttgattacaaaatgtcattctggtttttattatatatatatatatatatatatacacacatatatatatatatatatctgctttcctctcctctgtctggtaatttctagggtctgttctttgttccagtgttctgaagatttatgattatctgctttgatgtatgtcttgttttgtttattgtgcactcaatgaaataaactcagaggacccttttgctatgaaaatgcatgtccggccaggcgccgtggctcacgcctgtaatcccagcactttgggaggccgaggcaggtggatcacaaggtcaggagatcgagaccatcctggctaacacggtgaaaccctgtctctactaaaaaatacaaaaaaatttgccaggcgtggtggtgggcgcctgtagtcccaactacttgggaggctgaggcaggagaatggtgtgaacctgtgaggcagagcttgcagtgagccaagatcacgccactgcactccagcctgggtgacagagagagactccatctcaaaaaaaaaaaaaaaaatccatgtccttaacttctggaatggtttctgaattatttatttcatcatttcctccctctgtgttctctgttttctggaacttcaattcttcaaatgctggatctcttattttctattaaggtaaagaatgagcattaactgggctgtatgaagtaaggaaggaggcttgagattaaattcttaaacagtcttttgattgttctgttttcaggcctatctttattctaacttttagaacattcccaattattcttctgctttccagcttcaaaaattttgttgttcttatcagctcttctattccttttgcattgtgggtttatgtcctgatcgaaaaaaccctttagtattatcttgttacggtataacaagaacggtaatggtatgtactcaatctgtcgtcgttaactaaaagtccaagtaatgtgttaaagaaattcaaaattgatatttgccacgttttaagcccatttgtctgattataataaagtgaataaatacaaccttttatgacctgctggaaaatgaacaatttagtccaatttaatctattgcataaatggtgagtgatgaccacagattctaagagtttacagtactgagagagaatgaaaaaagggtaaagaatactttatatttattctaacatgatttttctgatgtgaattctcttcttgacaaccctgtcatgtgtgacttagaaatgcaaatgcttcacctaataaggcaaaattagcaacaggaaataactaagtgttcatataggaagtggggaatgcgttaatggaaagagactggccttgttattcatttatggtcctatttaagtcatgcctttcatgttatttgcatccagaaaacctctagtttgacttggtctgatctttatagacttgcacagcagtcggggagggtagaggctcagggattgcatgtccctggggtccctttttcccactgtgtttggtgtagcatgtgcctgtcattgccacggctgagagtgttgacttgtgctgtgtcttttttcacttactacgccaagggcaaaggtagccaggcaaacatcctgtggccatggggtagtcgatactcctctagggaagggaaagggacttgccagtgacaacccttggaacaaggtgtgtggactctcccagacttatttgtaaggtctgccaaagtggacctacactgtaaacagataaaaatactaaatatcccttaataagagacttagaagaactttcctgggagaaatgattctttctccagaacagaagcctcaacctgacacccacagctctttcccctctcctcaaactctcccgaccacctccagccctggctcctctgcccttctttgcacctagcagccccctcctcttgcagggaaaggctgctttagcctccagcaatgtgcctatcagcttcgtgtcagcagagccagcatctctttaaaaagggctatctccaaatgccaagaacattttcccctggatcagtatgcaaatcaatctttcaaagattctgattaaaccgaggtcaaatgccagcaaggccaggcatataatagagatgagggaagaaggtctggcagagacaggcttgtccacaccccttctgaagggcggcagcagcccagcacatgttgctcactccacggggcaagacaggctgtagcagacgctagactcatggcaaaggcacaggttaggattgctcctcctatccccttgatattagggatgtcaaggcaggcccgttcctggggggatgtgagactcctctgataggcaactttgcattgagggttccctgggcctcactgcaccttcctcagactgcgtgccagctaggacagtgcacccaaccatccctgtctccacgggggtcagacccgcatcacagttggacaggctgcatgcccagctcccccgatgccccattttctatcaccagttgtttcccgctaacaaaattgttgcaggtttaattgtatcttcatgtctgcctctcagaagatccagactaatatgcctaaatacttgaataaattccgattgattggcagattgggtgcaggacaggaggcctagacaggaagctggctaaacctgcaagagtcccgccatctcatttgtacagtctatatcctgtttgactttgtttcccttgtcctgcaggttgtggctctttcctcctggtgcctgctgagggattctatttactacacgctgtctgtgatcgcgctcatcgtggtgagtcactctggccatttcagctcccatcagtgctcttttaagcaccaggggtggtgtgaggctcctccacatggagttcactcgaggtcaccggtggcgagtgcgagatgcatgtctttgcttggaggcagatttatttctttcagctactttgatcacccagaactccagcctgaccaattgctggtcagagccggcatttagacttgggttatctgggtctatgagagtccatggctgttctcctgagaccctcgtgagcatggctcttctgtcgcttcattggcgtccctagctttggacatcacttctcccccttctcactctgtatgctctgccaggactccctgccctcccacagagcccattaccgtggccacctttgtgccaacacccacacatgtcacttagcagtgacacctccctgaggtccagtggtggataaagaactctctactagacatctccatgccccaactcaacatgtccctaaatagaatccttttttttttttttttttttttttgagatagagtctcactctgttgcccaggcaggagtgcagtggagtgatcttggctcactgcaagctccgcctcccgggtcccaatgattctcctgcctcagcctgccaagtatctgggactacaggcgtgcaccaccacggctggctaatttttgtattttagtagagatggggtttcaccatgttggccaggttggtctcaaactcctgacctcaagtgatctgcccgtctcagcctcccaaactgctgggtttacaggcatgagccacagcacccagtccctaaatagacttttgatgttttccccaggacttgcctttctatatatttcagtcctcgttcctatcgtagccacagactgggaatgagattaaactgacctttccctcaactcccagcatacccatttggcttaattgtaccgtgaatttcaggttaccacaatctgtccactgcattcctccagagcccacttcagctgaggctctctgcattgccggcctgacgcagcagctgctgcagttcattgcgggtcagtgtttccatgcagtgcatctccaccacttactccccgcttctctccaccccagccagtcctcacggccatccaagtggtgtctccataaagaacacctgcaaatgcttctatcccttgttcaactgctcagtggctctgtgtcatttgtggggaaaaactcatactctttagtgtggcaagctgggctgtccaaaaaaaaagggtgaaaaattgggaagaacattgaaataggagtcgggagatctgactcctagttctgcttgcccctttaccatcatggttaattttatgtgtcaactcgactgggctaaggtgtgcccagagggctggtgaaagtatttctggctgtctgtgagagtgcttttcagaggagatcagcgtttgaatcctagaagatcaccctccccacggtgaatgagcatgattcaattcactgaaggcccgaatagaacaaaaaggcagaagggtgaatttgccctttctgtttgagctgggctatgaatcttctcctgtcctcagacatcagtgctccaggttcttgggcctttggattcaaattgggacctacagcattggcttccctggttctcaggccttcgggcttaaacttgcaccacaccacaggctttgtagatggaaggtcgtgagacatctcagcctccattgtactgtgagccaatccctcacagcaaatcttcattttatatatatatatcttttgttggttcagtgtctcttaagagccctaactaatacagccctcactggctctcatgacctgggagaaatcaatctctctaggtttcagttttcttacctacacaataggaatagatcaactaaagggtctactcacctgtttgacaaagctcctaccagtagattattttattgtaagtctttatacaaataaaatgaacatgagggttgacgtgagattttccctgcggaaccagacaggtacttcagtgaccagcagtttctgacactgaaaatcttgagtttacaaaccatcacaaggtttgccagcaagtcaatattcctttaaaatgtgctttcaattttgtcctccagtgtccccagattaaaacaggaagggaactggacctaccatgctcccctaattccagggtccctttatcattgggagggttagaacccaccccacagagcagagaggttcatgctggaactgaagacatgcttctgttaggagatttaaggacatacatgaactatgttcttattctgttattacctgtgaaaagggtatgatcacctggaacccaaggactcttcccaggcttctctaataccccttccagcaagcttcatccttctatgcacaaacccacactgactgtgtgcactctgctcttctgccattacaggatgttgggatgatttttgaaaaaaattttttttcaaaagacatggttagggaacagtgtcaatgaacacagccctctactttgctgaattccagaaggagacgactgtgctcatgaagacaaggtggtggaacagaatggagcagatttggatctcctgggagcacagacttaaccacacactcccaacagcagttctgctggtgttggcttctttccctgttttccgcatagacactaactggactatgtgtgaaatcacttgtcttctgttcagtgtatctggatatatcaaagataaaatgaatgtaattgttgttaatgacgtgtgaataagtaaagaggttttgcttctttgggctttgagtaactccctcacccgagcctggtctttgggcaaagcaatcatctgccctcagggtgcagcatataaaccccagagctgagctagctgaacacgcaggctgccagggcaactccatatttcattcagacagcaacaaaccacataagcaaatgattctttgctgttacctgaagatgtggactgtgtatttacagaccagttgtcaaggctagagttttgtgatttgagaaaaattacatctctccactgttaagaagaaatagaaaagataaagtttgagtcctcaaggttaggtcttggttctttttactttaactggtgttcctccaactttagtctacactggaaacacccaggatgcctatttagttcaacaggctcttgggtagggcctgggaaattgcattttaaccaacatcttccctcacccacaggtgattctgatgccactagcatcagagaaactgcaccttgagaaacacaactttaaatatggctggaaaccatttccttggggtattcatctgttgcatagaaatgataatttctggagtcagttttcagattcccaaaggaaaggaatcatagcagcctaagtaactttagttgcctggatttctgactattgctagtctgagtagactcttaactcttgttaaatggtggccaaactcccagggtcatttttccatgaaatttgaaactgtccatgaggagtaaaacagagtttcacactcaaaagtgctgcagttcacaaagtacctctcacaatgtctccatatctattccatgcccccagccagaggctacaggtcgcacgcactgtcttttttcttcttctcctctttctgtttcccctaatatcatggtaacaaaatcatttttcttctgatttcccttaggtaatactaagtttctctataggactctgcaatgagcacttgaaattcctttatttaaaagcccttcctcgtacccaccaaataattaccaaccttcccaaacaatgcattcaactcttcgggttttttcaaaccactctccctattatacagcaatgaaatgttcagaaggcgtgtaactgtcggtgtcctgaggttgtgtaataaagagctccttcacccagagggcaagtcaggattaagcaggaccagatgctgttctgtgtacacgcccaccaaggggttcttcagacctcagcagaggggccctggagacaaaccatggggcctggagacccacagagaggcatggcgacttctccagagacgctgatggctgctgaggggccgagggttcagaggagggtcaggaaagcgccaatagagtccttaagacctggattcaaaatggctgaaatgtcagctgatgcgggcggggcatgccgaggtggacaaccaaaaccacaggagcaggaagcgcacgtgcattccgaaaccaacagagctcagaacagttcactcggacggagacgtggggcgatccacttccctattcgggtatttcacctaaactttcctctgtgctattttctagtttgcttgtttgaaggagaagcaaaagaaatgaattcagtcattgtctaaagcaattataatttcaaaaacataaagtgtgtgcttctcggggcccttccccagccccagtcaactttctcttagccctggtgacattccgtactttgaaacatctggccagcggtggagaggctggacaggggctctgaaagcgttgagaaggctcccccaatgccttcagtctctttttgcaagacagacatcaccttttaaatcctgaaagagttctaggttctttagagcccttccttgtgcccattcacccaacagccaggtgcaaattattgcagattcttcgctgcttctcctctgcccccagtgagcacttcaactctgggtatctccggcctcccagtcctgtcttttctccaaattccagcagacggacagttttttgtattgaaatgttactgtaatttacataatgaggtaatttacataaatgcaaatgattcattacataggcagtctagcagctgctctaaaagaaatactttatttttacctttcgtctctgctggaggacggggactgtgaacatggagaggagggcagccctcaggggaagcagataggcctatgggacaggtcccaggtaacgtgggccagcttgaaactccaaattcacaagtgctgtctgtctgctgatgggtcaggtgagcccttggcagcagtttgggggtcttcagggcaacctgaacactggcacagcagcgaggttcctttacaccaacacgtctccttccttccctgggacattcattgtcatggcaccgagtgaatggaacccagggggatatgagagagttcagctgattcacctgccacaggtgcccagcacttctagcagaatttacatggtgatagaaatggcctacaatcttgtgctgtccaatgtggtagccactagtcacacgtggctactgacaggcaactagtgggaccaaggaactacacttcttatcttattaattttaatttttaacaagcatggacttgatcctcagcaggggactgtgttgggtctactgataattactttttagtttaatactcgtgactatgcaagcaagctattttgtgagtcccacgttagagatggcatcaccagggctctggtggttaaatgattcacccaaggtcagggaccggtaatacctcgagtttgccagagcaggtgtctgacatggtgcagctctactgccccaatatagaatttggactttccctccaataaaatcctcctcttacagtctttaaaatcatcctaccccaccgcccactccccctgttagagacgagggttaccttcacttactttgtggtctagtttttaggcagaagggaacagctccagccaccccctgctagaattttttcattaaaataactaatctgaaataatctggaaatgattgtatcttgccctttctgtgatagagaagaaatctcagaggtcatgtggaagtctgtccatcaccggcagctggctgacctccaaggccctgcccctctgacccatcaccctcccctcctgcacccatttttcatgggaattaacctcttctctctccaatttagaaacttggggttcttatttttttatttcaatggcttttgaggtacgtgtggtttttggttacatggatgaattatatagtggtgaagtctgaaattttagcattcccttcaccggagtagtgtacattatacccaatatgtagtttttgtatcccttgcccctcctcccacccccccaccttctaagtctccaaagtccatgccaccacgctgtatgcctttgcatacacatagcttagctcccacttataagtgagaacatacggtatttgattttccattcctgggttacttcacttagaataatggcctccaggtccatccaagttgctgcaaaagatattgtttcgtttcttttcgtggctcagtagtattccatggtgtatataaaccatattttccttatccactcgttagctgatgaatactcaggttagtttcatatctttgcaactgtgaattgtgctgtgataaacatactcacgcaggtgtctttttgatagaatgatttcttttcttcggggtagatacccagtagtgggattgctggattgaagggtagatctactttcagttctttaagacattctcatactggaaaacttgaggtccttcagctcgttgtgccctcattacatttcagccctcaggtctttcagctcattttgccctcattacatttcagctctctttctggcaaagtcggaataactatggtagcaagaagatcctcaccgagaatgactttgacagaattttaagatccttaaacaaatcgactatggtcttacaaaggtcgcctgttttgtaatccctgctgtcaacaggaggaaggaaagtcctgctttaatgacactgggtaaactaggaggccggttacactctcatttgctgcttggacagggaagtgcatccgctggcctggagaccccagagaggagcctttcatctctaacaaggaaaacaacgtggaaactgtagctatgtgcttgattttggttttccctgcccagcaaacatagtcctttcagtttaacaacccccatctcctatatcctcagtacttgcccttttttctttcctgtagcctgccttcatatatttatacaacatgatcagctcggctaaagccctgcccgtaggtcattttttccctgcccttctgcaaccacaaccttcatcaatcaagcctataagacatcctgaagtaggaatttctgcttaactttgaaatataagtgatactggtgcctaacagccagcttcccagtgtattccactggatccctctcctcagatgaaatcaccatggccttagctaagccgtctgcacccccacccaagagctgaagaagtgagaactacacccactcaagggagttcccgtgatattgagtgggaaaagtctacggggggctgttttctttgcagcaaggaaggaaagagtttcaggtttcagtctcttgaaagaaaacgatgatgttgattttctcccattattttcactgcttaaaattctcatggtgccagtgattacaatacatgctatgaagtcttagcttcagcaatgcagcctctcctgcttcatggtgacaatttacagtaagcaaacccaggggctgacatggcgatgttgagacagccacctgcctcccagctcagccagcctcttctctcccgcgtatactaggggctcctggctcttcctcccctgctcctccatgttgagcactccattcccttggcagctctctgggttgttctgatatccagggattcgccggcctgatgtaagcccgtcttgcttggaagaattctggagcagacaccaggaatgaaaagccggtttccatggtacccagccgtttctctgaagcctggaggaaatgagtgcttttttcaaattcattcctgttgaacatttagctcagcagcagaacacgtggaaacctcagggcgaagccaagggtatctttggatgaaccacatgtgggtcagagggcagaggccccctgaccagctggtgctcagcagatctgagatccagctatcagtatcacccttggtggtctctgggctatcgcagagcctggcccccaaacagaaccaacagggcacagagagaagaacgcttacccaagggttgctttcacaaatctgatggggaagaagctgagtcagttccaaagcccacaacaggaggtccgtcaagtgcaactcatcgttgaggacagagtgttgaccccaggacagagcaccaggcaggacctgcccctggaacaccaccttgcctcaagacagcagcggctaaagccgccttcagtaggctgcctgccttgaggtgattcccttccttccaggagatttaatagaactgcgaaaatggacttgaactgacttcatttcaacttcactaccttggcaggctggacatggagggaggactggaacgtgagcaccacttagtggtcatttgcaggaactgcgggtgcaacttgttctagtctagaaagaaatgatttcaagttttcttctacactagtaatacttatctaagggatgggggatgttgctttgatttcttttactctcagctagtagagcataaactacagagggatacgcaacacgtgtcttaaatgtattgaataacatgaaatctttaaggaataacaaattcatttcctaaccttcagcaaactcaagtgaaaggaacctcatccttgccgtttgtagagttttctgagggagcgattcaaatgctccatcaagatggtccagcaaggtaccctcccgatggaacgttctgcaaacagcgccagtcctaatttccagtcttcggaagaggcgatgaccagctgcttgttctccaaataacagcactgaatgttcacaggcagttgatagctcatctccaccttctttctcatgatgaggaagccctgcttctgtttagagtttttttagagacagggtcttgctgtctccccaaggctggaatgcagtggccagatcatagctcactgcagcctcaaactcatggctcaagtgattctcccaccttgatctcccaaggtgctaggattgcaggcatgagccactgtgccaagccaatttagattttctcagagtcctgatttctagtcccttttgttcatttcattgttcttttctgagtcctctcattcctccacacagtcctctcaaaggagaaggataaacccgaatgatatttgccatcagccacagggtagagaagccctgactttgtggaggcctcctcctccacctcctcctcctcctcctcctcctccgccttctcatcctcctccacttcctcctcctcctcctcctccgccttctcatcctcctcctcttcatctacccttatgcattctgagtgatggggcatcttcacacaaggcagagatcaaaggggaaactatatcagttatttgcatgtttccggatctcctccattagttagtacttgtagtgagatcacctgcatttctctttccctgtctgcctccctgaaccatatccccaaccacagctccccaagccacaaccatcctcttgactccagggtcatgaagctctggacctaattgcatattttgtccaatctcacccggatttgcccactgtttctctgattattgtgctcctgtttggggtccctcctaaaattaagcccaatctcattttttctttgctatgatcattgaaatgatcagtagctaaagtcctatgaatctcagggctgactgctagcagacaggaagagtactttcttccagggtgagcgatctccaagcttttcctttgcagaatctgtgccccacctatggggaggatcactcagaataagggctttctaaaagctgctttcatattctatgttattgcctgccttccctgatagaagaaaattaaattggcctggtctaataaactctttctcaatatcttctgttctcttaagtggctacaaattgattgttccagcctgctgcaaggactaatattgaattaacttcaattaatagaaaatgttttctatcttaaataatttgatctgctccatgattttttggcaacaatcttttttcaaaaaagaaagttgggggggttatacaaaagagctgtcaatgccttctaggggttgggtaccatgccattcaacctggattatgagattgttgcctttatttctttaattctctgcccattctagtttgacattgtcatcccaatgtcaacttgttgaatctgataataaagatgaaagtaacaaaaatgatgaagcccacatttccaatggcttgttgggaagaatgagttacaaatgagcacagctccttcctcctcatcctcattttgaccttcaagataattggaaagagttgctttatgcgctttgtgactggtgccctgaggtgttctctacgtctctacccagctcatggttactgccctggctggaggctgatgccatgcccgctttgttaactgagtttcccatctccaagttgtgatggcagttgacacccagagtgtcctgcaagtgtctgcttcagtctgcagagggctgctgcctctaaaggaaaggccgctctgagacgaccatactcaaagcagttgtccttcaggagtttgagaagaaagagctatgaaccatgtcctcggcttcctacttctatgaaatataggtgtactcatttggtttcggcaacatgtcatcagccatgtgtgtcatgaaaaggacaccaaattcggagctggggctgagttctcgagccaattctgcagcaaatggagcaagcctaggaaaattacttatgttctctgtgactcagtttccctgtataatcaaaggattacactaggcttccccccatgcccccacaaggtgggaaatgattttagatggtatatagaccaggacttcagtagattaaatcctgccgtgtattctctctgtattctctttcaagtcctaactgatgagtaaacctcagtggggtgctagtgtgcctttgactgcttctgacccctaataatcttccttagtgaaagggcaggaccatgcccagggcttgggcgccaacagtgtccagatgggatttgcaaacaccatttgttgttaatgcacttatttttcggggtgatggcaaggagtgttgatcccctacttctggttgtgatgtgaagtttcctttgaaaataaattattttaaggaaacaaaaaaaaatcaattaaaagaaaaaattgagcccatagaagtccaagcacttgcataaaaactgaagatgcacagacatgcagaaatcttacagagactaatatttggaagaacctgctgagctcctacatccccttgcagatctaagattctacaatgggccttgctttacaaagcaggttagtcacacttccctgtcactctgatgttgtacagaaattgcaggaagaagggaattacctgaggctgttcttttccacacatgcccaccctgatctaccaacacctccttccactaacactggccaaaggccaaaccagtacagagggaagtttacccacagggactccaggtcccaggacaacccagtcctgattacaccatcccaggaacaaggtggatactgcgtgcagccttaaagcgtgtgtgtgtgtgtgtgtgtgtgtgtgtgtgtgtgtgtgtctaatcttctattctttttattttttcacagtttatttatgatgaaaaagtttcctggtaagtacctctctttccccttctcatttctgaatgttatgttgcagagccaaatatattgaagaccagtgttgggattcaagaaagaaagggaagtgtcatgacagcttagaatgaggagaatttcctaggaaccctctgcacacctcaggggagaaattaaattcattttcacagagtcaagacctttcctcttgggctagagtggtggggttctatttgagatcctaatatctaaatgtctttattatcctatgtctggacatcatggcttagctgtgtctttctacagtcagccatgtgctagggtagagttaagatttgactgatttttgggccgggcacagtggctcatgcctgtaatcccagcactttgagaggccgaggcgggtggatcacgaggtcaggagatcgagaccatcctggctaatacggtgaaacctcgtctctactaaaaatacaaaaaattagccgggcatggtggtaggcacctgtagtcccagctactcaagaggctgaggcaggagaatggcatgaacctaggaggtggagcttgcagtgagccaagatcacaccactgcactccagcctgggcgacacagtgagactccatcccccaccccccaaaaaaaaaattgtgtccaaaccaagctccatgttcccaatcccacgtttatcttaggaattaggacccaggcacttctgtgaccattaatccattaaagttccccctgactttcaaaagatcttagagctctgaaaattggtgttgttggggatgttttattttgatagaaactgttgcccaaattggcccggcatggtggctcatgcctgtaatcctagcactttgggaggccgaggtgggcggatcacctgaggtcaggagttcgagaacagaaactgttgcccaaattaaatatatggcaagacatttgcatttggtccaactgttcaaatcctcgttttcgagatgggttctgagcaaatcaagcatgtttgaaatggaaatggaaatcgagtgtattgtgcattctcgttacatattttccgaatatttgatctacagaggtaagcaatgtgaaataacatattaggaataggcgtaggtagaaaatctccctggtattattgaaagctgtgaatgagccagaaaaagtagagtccaccaggcttcactttcagcaaaatgactgctaactctttgttggtgtgggcctctctgtatctgaggacatctctgactttcagaattagggggcagtggagaacccatcacattgatgataaatgttacttgctatgtcaaggtattaagatacttttgctaactctcctctttgcaagaagaaagaggaggagacagctaggagaaaatgagaaggaggtcttctttgaatcatagtgaccaataggctgaaaggaattgacatgcccaggagcaccccagatcagagaacctccttgttatatcatcctggaggtggctgccaaatggagtgaggggcatttttcccccctgtccttggggataaagtgcagcacaagaaaacttccagaagctgatggcgtagttagcacaaccactgctccgccttagcaaacagtaggtgcttcaacgttgctcagtggtgctagtctttgctaatgacactccccaaaagacaaacaagttgtgatcacagttgatctcagaaatgtgtgtgcagctgttgtgcagaaacatgttaggaaaggctacccaggatggtttgctgtcagccttagagggagccgtcttttctaccacctccatggcattgctgtatgaaagccatggcaagtgaagaaagcaggcttcaccatcagcccatttcactccgtatcctcaaaacatctcgggatagttcagatggtttggagcaagaaaaggagtgtctatttcatcttcattcctaagtttttcccatgatgttaggtaaccccatcctagggtaggtgcccgaggctgcagcagaagggtctagattctggaaggtacaagtcatcagagccctcgccctgagcaccgaggctccctctcatccaattatgagtaagaggcttggagggccatggatacatgagttgcaaatcccctcgtgtgtcttgatctatctggggggcattggaatcataagtcatgcacagttgtggcttccagggaagaattggcctgggggggccttggtggcaccagaactacattcttcccagagcactggcctgtcgtgtaacttgttattacacgcatgggctgatgaagagcattttgcacgtgagtgaggctgagaaattaaagtctgtgccactggcccttatctactttgggactcccggggatttcaacttctcatttaatggatgaaaaataatggaagtttaagaattttttactgttcacttcttctatcttcttaccaagccaatcatgaccatttattttgctgaaatggtgcgtctaggtgctgatttctctctttaaaatcagagtcttcagtctgtgcaattaaagcacagtaacattttgaaaatacctttaacagagagttccattcctcattatagaacattccagcatggcctagagatttcaaggcaggtaaccagttcaccccaaaaaatcttcaaaaggaaacaaatttcaattgtgtttatttcgaaactacagtactctttaagaggaagtgagctttgtcaaatacaaatacaccaggacaaagtacccctgtcatgcagttcagattctttcaccattcctgaagcagcattctgcaggaagtcacattcagtcaaaaaaatggtggttgacagttagtcaggattgattttagtagcaggtactagaagaaccagctacagcgtattgaatacatactggtgtatttttcttactatcagtgccccggatgtaggtggtgctgtggctctgcatttcccctggcctttgcctaatggtcccaagatggctgctgcagccccagccaccaagttcatattgaagaaaggaaggaggaagaaggggcactgttgttctttttggcacacttccaccttgcatctctttggtcgcagaagggtctgccttgaccactgagcagccagggagattagaatgaccactttagaccaatcatgattcatgctcagggcctggggtcaggcgcaccctctttgagatcagaagggctccatttgctgcctcaacctagtgggtggggttctcttagcagggaagaggcaggggaatagtggtgagtgctcttcggttaggtgcctatgtgctaaaagacacttgacataggaagcatcggcaggtcatggtggctcacgcccataatcccagctctttgggaggctgaggcaggtggatcacttgaggttaggagttcgagaccagcctggccaacatggtgaaaacccatctctactgaaaatacaaaaattagccaggcatggtgatgcacacctgtagtcccggctgctcgggaggctgaggctggagaatagcttgaaccctggcagcggaggttgctgtgagccaagattgtgccactgcactccagcctgggtgaccgagcaagactctgtctcaaaaaaaaaaaaagaaaaaaaagtgtcagaggcccacatattaggatgtatgctcgacccacagagcattcccgtgttgttgccagaaggaattcggaatgtgtcttcagggagtctgaaggcccaacaagaaaactaaagaacgcagggcgatggtttggtttcttcttttgagtccgaagttgtgactttgggagagaaaagagaccctgggattgcaacctggaaactcttcttggtggggctggaaaacagcttttgctgttctgggatgtgttcaggaaaccagagccaacagtgtacccaggtgaggagaggagcagtcctcacatctgagaaggaaccgtctttggtgagaatcagggacccgttgaaaatgattcaaaatggaagcctggggagggaagaaacaaacccagatcagctacagaatgggatcctcagaggacagcgggtgaggtgtgctcaggaggaaaggggagaaggtgcccagcgtcctaggtgaaagggcgagaaaggggaccaaggagggccgggtgacttccaaggtctggatgcttcctaagcacctcctctacgccagggaaacatgtcgtacaaaaccagagctggcccgacctggagctctctcaggctggagggatgcagacccttcacatgtaactgtgggaccacatggagaggctcaccacactgaggagagggggtggggggaagggccctgaagagcattaggccaaggcttgatgatccaaattcaaccaggtcaaaaatgcatgaggaacagcaggtggggcggcacagaggcctcctagagcccactgggttcaatggggaggaagcctggtgagccctgtgtctgaaagccaacagagcaaacttgaaatgtcaacaaaagcaaggaatctcatcctacaggcatctctgcaaaatggccagagagaacctggtttgaatattgcaacagaagggcttttgatgagtaaaaaattgaaaagatctaaaagaattagaaagagcatacatacgcctgtttataaagtgctggacttaattcaatctgactacaatatttcattaaagttgattcattttctggtgacttctcactgaatctattaaaatgcatctaagcaataacgtgacatcccttcagaacctgggagcctgttccttccaaatgaatgggctgtgaataaatctcacttttcaccatgaagtgtatgctacgtatacattggtgtcgatgagataagaactatgttcaggccactggaggcattttgcaactgaaaattgatgtttggagggagtgtcacctgcacagatgagctgatggctgctttctgctggggagaagaggcaagtgggcaagacctgggggtgtctgcgtggggagaaatcagttgtcggcattttaaatctctggataatgagacaccagataccagggaaggtgtcaggtgtgaggagtggtgtcaagtgactgctagaaacaggtgttagttacataataaatgagtaataaatatataaacaagataatcacagactgcttagaggtttgaagaacataaacagggtcatgtgagagaaagtcgggcaggggcaggcagggaagattgcttggaggaggtgatatttaaaagctggtatctgcaggataaaagtggccagccaaggagtgaaggcaaagccattcctggccaaaagaacattcagtgcaaaggctctgggagagggaaagagacggctgtgtgcaaatgaaaggccattgaggtggggcacagataggacacaagacaacatggagacagaagaaaaggccaggatttgcaaggaaaaaggaaactttcattttttttcttaggcattttgggaagtaaagattttaagaagtgcattgacatgctcccatagtatcaaggaaaccagttcagaggttgaagtgaaaaatgacctagggagggcacagtagagaagaaagaagtcagtgattgatgaaatacttgagacacagagtccgatggatatgggagtgaggaaaagggagtgctccatattgatttccagattctgggcttgactgggcagggagtggtacagttgactgaaaggacaaagcccagggttggttttttttttgtttttttgtttttttgtttttttgttttaaggaggctaggaaataagaatgaagaattctgttctgatagacatttagacttccaggtgcagaggccaaatatatgaatctggagctggagagaggtgtggtgtggatgtgtaaattgggggtcattatcatgtatttggtatttatagcaataggtcaggatgaggtcacctagggagaaaacataggcaataaagatggcccaataatgagaggatgaactgaaggagtggaggaggcaaaggagatggagaaggagaagctgggggcaggaaggaagccaggggtgtggcctctcggcagtcagaagagagggttttatgaagcggggcagatgatctcctttcagatgctaccaggaaatcgaacaggatgatggacaaccacccactcatgcttggactggtgtggatagaaatcactggtgcccttgacaggtgattcaggagatcggggggtgtggaagttaggctagagaaatttgccaactgaatgagaggcactgaaacgcagtgtgcacagccctttaagaagttttgccatgacagaagctgagaaatgtggcagaaattgaaagggcttggataccctgatttcctctctcaatagtgcatctgagcactttctagaataaatacctacatctttgcataatttgttttggaagggagatggaagaaagggttttactgtgtcgcccaggctgtcgtgcagtggtgtaatcatagctcactgtagcctccatctcctgagctcaagcaatcctcccgcctcagcctccccatgtagccgagactccaggggcacaccaccatacctggctaattttttaatttttttctggagacggggtcctgttatgttgctcaggctgttctggaacttggggacataagtgatcctttcctctcggcctcccaaaatgctgggattacaggagcgggtcactgtgcccagcctgcataatcattcttaatggatacatgaacctacgtatcatttatgtacccagtgccctattttataaccacctggcttccttccagcttttcacttttttataaacactgccgcaggaaaaacccttgtgtatgtatccttttcacatttgaccaaatatttctctaggatcagcttctagacatggaatttgaaaagagaaaaggaaggatgggtataacctggagtttcctcatctgaccattctccagtaacctaccactgaagccaaaattactccctcaatgagctgatttgattctgtagctaaagcgaaacctggaaaacaagctcctggtttttagttggaagccactaagataaagaaaacagaagtattcagactattagaagctcaaggcacattctagcaggtttttcttttcttccttcctgtggaatgttttcccacttattccttcttactcttcgactggtaccttccctgcccaggttccgtctgtctgtctgcctgcctctctccccacttctaccctttatgcctggctcctatatatacagcaatccctcaggcatccccggcaattcctctaattttagtttccccttgtaaatatgtctgaatagtttcagtgaatgattaagctgagaccagatgtatacatattgacctatattcagcaacgtgtatgaaaggcttgctgctttcaaagagctcttttaggtgacaaataacagagaggaaggggcattttccctttaggtgaggagagaagagaaagatggttgacagccttatgcagcatagagaatgtctctagaccaggaaatatccgtcacctagcaccgtctgccttctccttactatcctggccgtttgcatcaaatatgtctttaaaaatgaggcaggtgagtttcacagatgtccatgactgtctttaactgttcttggtttacacacaggtgggagtctttagtccttgtgctgatgtatcttatctacattgtcatcatgaagtaagtaaaatttttcatttcttatccaaaactgtttcttgcattccacattatgtgatgatgtgggaagaggattggggtgggtatctgactggtttttcagtgtgtatcatcacagtcacttggctccctgccagactgttgtgagtcactgtaattttgattagtatcaattgtagtgacccttccagcccatatttgatgatagactcaaagcttcagtgtttcacttgagaactctctagaacccctaatctctcttcaggatctggcagctctgggaggtttcttcactctctttcttaacacaaaggagataaaactcaatatgttacactgctatagagggtgagagaagatgcaaggtagtctactcaatatggcagccaacatgagccagccatccggtggtctgtgtagacccagtctctagggcttgcttgtgaagggaattcctagggtaggaccttcatcaaacatatcctggcatggagttatcatgaggtaactgatgaagagttagttaagagacagctgaaatcatggatcaaatatctgtggacttccattatttatatggtattagtcatccactgctgcataacaaaccatcccaaaacttagtggcttaaaagcacaaacatgtattatctcacacattgtctgagagttaggaacccaggagcagcttaactgcaaggttctggctcagagtctctcatgagtttgcagccagagctgccatcatgtactggactggtgtgggagaacctgccttcaagcgatgctggctcttgactggcgggctgtttctcaccacatgggctcctccctagagctgcttgagtggcttcctccagagcaagtggttcaagacagagagcaagaagggccctgcagcaccttttataatatcccagaagtcacacgccattacttctaccatattctgtttattagaagcgagtcactaagtccagtccacactcaaggggctggcatcacttagtgaagggaaaaatgtcaaagaactgttgaggtattttaaaaccaccatgttatgacatatgttcttttccctcctggagttggggtagcttatttatatcaagaatttgccaggcgcagtggctcatgcctgtaatctcagcactttgggaggccaaggtgagtggatcacttgaaatcaggagttcgtgaccagcctggccaacatggtgaaaccccatctctactaaaaatacaaaaattagccaggcgtggtggcgtgcgcctgtaatcccagctacttgggaggaggcaggagaatcgctggaacccgggaggcagaggttgcaatgagctgagatcgcgccaccactccagcctgggtgacagagcgagactccatctcattaaaaaataaaaataaataagaattgtatgaccaatgtttcccatgctgtaagttaaatgtaagcaccatggtggtaagcctgctggttcatctttttgccaggcaccactgggatgaggaggttataaagaatgcagagatgttctgtgctgcaactgcccaaccccgtgggagctgctgcttttcctctaaattagcccatgtttccccaacatatgtagccgtaggagtgactgccttctctaggggcaagaaagtagaaatccatcaacaatggccagtttggacatatcaggtggcagtctggaactgacacattaaggtttcttattgttgaggcctgacaaaagttaattctggtgaccagtgactgagacacttgttgagagaaatcaacacggacattggcaaatatcacaggagcaatgaaggtagaagctggcttggccagtgcccagggtgggctgtaggcaatctgctgccagtctactcaatatgggggccaacatttgtgaggggagccatccaatggttactgtagaccccacatctggagcttagtggagaagggcattcctagagtaggaccttagtcatacatatcctggtaccataaggtaactaatgaagaaaccagaagttacacaccgtagaactaatcatttaaaaataccaatagatgagctgtcatgaaaaccagagttgatccaaagcctttccaaactttccagcccccaaaggaaaagcctttaaagatcagagtacccatcttatgcctctttgtctcaaagagcaaaactatatagcaaatcagtgccaaagtggggaagcctcaaactactgtctgtgtgtgtactcacacatcttcctttgctgttttctagtgcatcgtttcaattttttaacattttgaggctctaattgagctcccaaaagtggattagttgattattctggaagaatcgccacacagtgtctgctctatgcccaacattaatcttgggtcttgaatcttaattttcatgaaagtatgtttcaaaatgaattcactaagggcttcagagagttaagtattcttcaaaaacagatgtggccagagagaagaagacttgaggaattttgctggcatgcatcttatagccactgctccccttttccaagccaccttgaagcccatgagtcgctggcaggacacgtgtacagtaagatagtacagcgaacacatcctctcctcttccccaaaccgtaccaaatgtggaagctaatgaggtgtgtttctgctgatgcctcacttttaccaacattccagctgttcaaaccagcaggatacaaataaaactgggaatggaagctactgtgctcatgaaattttctgcataaattctggtcctaagttctaaattgaaatctctgctctttagccatccccctctgcaatcagaggctttaatcattgggttttatcaaatctgatttataaaattgcatgcttcacaataaaatagcttcagggtgcaagcacaaaatttaaaacattcaattaaaaatataaaacagcaacagtagttaagaaaaaaaacagcatatattagaatcgtcagctgcctcctaggtggagagtttttaaatgactttaaacattctatctgaaggtcaaaaagcaatttcagattgtccagttaggtagaaaccttcaaggagcataaagcatgcctggccttggcaaggattgctttctgtacatcccaggtcactgctctaggatttgttccccagatggggtatgtgtgctggtggttaagaaccagtgcctcacattcagccctgacagcagagccccctgccactgacagtcatgggacctcagccaagttcttcagccatcttgaatctcagtttcctcttctgcaaaacaagattaataataatttctactattattatatatattccatgagaacggaatgtgacagcttagttaagctgtcaagctaagttaagcttagtttaacctggtatccagttttgagaaagccctcactgtatagtattattatcctgttctctaaaccctgataaatgtataatacatgagtttgcttttgtactttaaaagcaaaacctaatcactgggcactgtagtgcatgcctgtgatcccagctattcagaaagctggagcgagaggattgcttgaagccaggagtttgagactaacctcagcaacatagcaagaccccgttccaaaaaaaaaaaaaaaagcaaacctttatgcaagtcagtatttctttcagggaaatggagtctaagtcaagatgacagaaacactgcctctttccctgtcgctctacagggcaaggcatccttgtcgaatctagaaagtgtggaggccttttcactaacaggaattttgaatatatacaggagtctgcagaatagtacgatgaaccccatgcattcgtcaccacccccagcaaccatcaacccacagttgccccatccacaccctattcacttcccttttctcctataattttgaagtcccggacatcatactagttcatccacaaaaattccagtatacatctggacatctctagacacagctggatactcttttaggattcttttttttttcttttttttttttttttttttaattttcatttttatttttattgatcattcttgggtgtttctcacagagggggatttggcagggtcgtaggacaatagtggagggaaggtcagcagataaacaagtgaacaaaggtctctggttttcctagggagaggaccctgaggccttccgcagtgtttgcctccctgggtacttgagattagggagtggtgatgactcttaacgagcatgctgccttcaagcatctgtttaacaaagcacatcttgcaccgcccttaatccatttaaccctgagtggacacagcacatgtttcagagagcacagggttggggggtaaggtcacagatcaacaggatcccaaggcagaagaatttttcttagtacagaacaaaatgaaaagtctcccatgtctacttctttctacacagacacggcaaccattcgatttctcaatcttttccccacctttcccccctttctattccacaaaaccgccattgtcatcctggcccgttctcaatgagctgttgggcacacctcccagacggggtggtggccgggcagaggggctcctcacttcccagtaggggcggccgggcagaggcacccctcacctcccagacggggcggctggccgggcggggggctgaccccccccacctccctcccggacggggcggctggccgggcagaggggctcctcacttcccagtagggacggccaggcagaggcgcccctcacctcccggacggggcggctggccgggcggggggctgaccccccacctccctcccggacggggcggctggccgggcggggggctgaccccccaacctccctcccggacggggcggctggccgggcagaggggctcctcacttcccagtaggggcggctgggcagaggcgcccctcacctcccggacggggcggctggccccgggcggggggctgaccctccacctccctcccggacacggcggctgccgggcggagacgctcctcacttcccagacggggtggctgccgggcggaggggctcctcatttctcagacggggcggctgccgggcggaggggctcctcacttctcagacggggcggttgccgggcggagggtctcctcccttctcagatggggcggctgggcagagacgctcctcacctcccagacggggtcgcggccgggcagaggctctcctcacatccgaaacggagcggcggggcaaaggcgctccccacatctcagacgatgggaggccgggcagagacgctcctcacttcctagatgggatggcggccgggcagagacgctcctcactttccagactgggcagccaggcagaggggctcctcacatcccagacgatgggcggccaggcagagacgctcctcacttcctagacagggtggcggccgggcagaggctgcactctgggcactttgggaggccaaggcaggcggctgggaggtggaggttgtagcaagccgagatcacgccactgcactccagcctgggcaccattgagcactgagtgaaccagacaccgtctgcaatcccagcacctccggaggccgaggctggcggatcactcgcggttaggagctggagaccagcccggccaacacagcgaaaccccgtctccaccaaaaaaatacgaaaaccagtcaggcgtggcggcacgcacctgcaatcgcaggcactccgcaggctgaggcaggagaatcaggcagggaggttgcagtgagccgagatggcagcagtacagtccagcttcggctcggcatcagagggagaccgtggaaagagacggagagggagaccgtggggagagggagaccgtggggagggggagagggagagggagagggagagggagacggagacggagaccgtggggagagggagagggagagggagactcactcttttaggattctaaaaggactattttctttaacataaccacattatcgtcatacgtaaaattaatactaattccttaatatcataaaatacctaatgttcaaattttcagtggcctcacaaatgtctttttcattgttttcttttagtttcataaatatcataaatattttaaaaatgagaattcaaataaattccactcattagaattggtggcccatgacttgctgctgtgtctgtatgtgtgtgcatgtgtgtgtgtgcattttccttgcactttgttctttaatgaagtttggctgtttgctctgcagagttgcccacggttggaaagcgttgattatatcccatgatgtggcacagtctgttcccttggcctctgtgtctgtgtgttgtctgtgtgtgtatgtgtgtgcatgactgggcatctgtgtgtgtctgtgtgctgtgtgtctgtgtgtgtgtctgtatgtgtctgtgtgtgcgagtgtgtgtctgtgtctgtgtgtgtgtctgtgtgtgtctctgtgtgtgtctgtgtgtgtctgtgtgtctctgtgtgtctgtatgtgcatgtgtgtgtgtgtgcattttccttgcactttgttctttgatgaagtttggctgtttgctctgcagagttgcccatggttggaaactgttgattatatcccatgctgtggtgcaatctgttcccttggcctatgtgtttcctatatgtctgtaattgatctgattcaggctagactatgtcccaagtggtggtaaagttccatcaccaggaggcacggtgaggtctgcctttctctgtctgtagtgttggcagccgtcagcattcaggttccatcaccaggaggcatggtgatgtctgcctttctctgtctgtagtgttggcagccatcagtgctcagtgtctgcatccattatttcgtttgggttgcaaaatagtggtgttctaattctacgcttcgtgtcttatgaactacaaatgacacccgtcactttgactagttttctgttctctctcatgcaatgtagtaactgcacgttcctagagagtacaggaaagaactcatggatgagacggtccagccacagaggacctcttcgtctctctgaggtcttgttgccataggccagccacctcagagctgtacccactgaagaatcaggcacaaaggagatagctgggagggaatccagagagcttcatgtctgtagcagcaaagagatgaggaaagggaagagaaacataggttgagtggccttccagctggcaacttacggtcaccatgcctaactgccatgcctatgggaggccggaggtcaaactggaggtccccagtgggctgtcccatggccagtaaacgatggaggggggaaaagcagtagcagccttttgtgacatggaaactgtgcctggctgtctttgcccgtgagtttttatgagttttctaggattcctctgtgggaatcttctcatactaaagctagggagactgtaaaaaaccatcctcggaacttgtacaagcttcttcccttcccacctcagcctgctggggcatctaaggaacactgcacaatgtattcacttgatcattctggaggataatagcctagaattttttcataaagctaagggcccattggatctgaaacttaggcacgatagtcatagaaatttggagaatcccaacccatgacctcaggaaaccaaagccatacagagacctagacggccaaccggactgtagcacatagactgtgacacacagccactgttcctggggagtggtgtggatgaagcagcttctccttctcccaaaaagctggtccctgattacaaaggccctggagatgtggcccagagaaggtagaccttgaccatcctactgagtcttagcacagtccttccatgtgcagactgagaaggggagctcaatcccagagaggcccccactggcatgaaagaggtggcaaagtaagcaatgtgcccatgtgctctggtttatttctataatggtggttttcttttcacttaccatttgttcataaattgggaaatgggacaggcttgtatattctgagggggaatgggttgagaaaattagaacactaataacttgaggcctggtgactgtgcatgcagactgggagagctctcagaagcacttggtgggagttgagaaatgggagaatggaaaacactgatggactctgcccacttgtcgctttgctcagatataacgcttgcatacatcagtgctttgagaggaggacaaaaggtgccgggaacatggtcaacggattggccaacaatgctgaaattgatgacagcagcaactgcgacgcaactgtggtgctacttaagaaaggtaaccaaggagagcactttggggtccaaggcaggaggatcaattgaggccaggagttcaagaccagcctggccaacatggcaaatccccatctttactaaaaatacaacaaaattaaccaggagtggtggcccaagcctgtaatcccagctgcatgggaggccgaggcatgagaatcgcttgaacgcaggaggcagacgttgcagtgagccgagattgctctactgcactccagtcaggacaacagagccagaccctatttcaaaaaaaaataaaagaaagaaagaaaaggtaaccaaggagatattgtgtgtgagaagaaagtgctagaatatgagcccatctgcccactctcatagccacacatggcatgtcccagctggccttgagagggcactccctgccccgagagagcagaagtttccagtcctccaaccctccctttcactacaatgtcatggagccatctcatacctggtaagccccttagagctcagaaagccccctggaaattcccaggcaacacatttgctcgagtgctgcagagaacaggatggcaaaggaaaggagaccctaggttctgagatagggttttggttgtgtgaccatgaagcaggttatgtaacctcttgagcctcagttttctcttctgaaatacgagaatcatttttgtaataagcaaagtagataaatatgtgtcagagtttagtgcaatgctctataaatgacaggtgttattagtatattactagatccaaattcactttaaggctacattaactcagtttccaagctgcaaacagaaatagaaaagtgccttcctcttcaaagtaattcttgtattcagtcgagtcttacaaaacagctgagacactaagggaaattagatggtgctctcaaatatataatattttttctaagaggaactcagaaaataatcatttaattttacctggaatgtgttttttacttaattttttaaacttttctcttgaaatatgggagtttattttttcttggtcccatatggttgctttgcaggaagaaaaaaaaagaaattagaaagattattttcaaatacatctatgggttattttcaaatatatctctgacatcactgcatcattagattttcaaaattaaatatttgatatatttttctgaatgattatacatatgtttaacaaatgacttaggtgatttagtaccatttcacatgaggattttatttagtttcttctcttctgggtagtttataaccgtaaaaggaatatgctaaagagagctacctagtattagccagtgtttccagagatcacttcatgctttagtggcttggaaaacaggagctagtattacaagaggctgcagccaagtacccttgaactgtgtgcatatacagctcattcatagagagggagctggacccttcgtgcaacattattttttaggccttctggtgaactatcacacaagatttgtcccaagcactcttctgacctcggttctctgtaacatgaacaactcacccaacacttgtcagctctgctcatagactgggctgagggaatgtgtacatttcaccaccatgtcctccagtgcagaactgcactaacgtcaattcagtagcatttaacagctcagtatgaatattgctgacatttgaagggcatatagggtacaaagttcttggagtcttctctgtgccccagatctgaatggtgggaaaagaatcctttaaggacaaggaggaattctcttatggtatcattaattcttaccatgtcagtgaatgaggcttaaattgtttcaagtcctttcaaaagatttaacatgaacacccatggaaaggagattttgactcttgttcaaaatttgctcactgcaacccttcctggctggctggatgaatggaaagaaggaaggaaagaaggaataaggaaagaagagtggatggatggatggataggtgagttggatggatggaaagaagaatgaatgcatggatgggtggaaggaaggaagaaataaggaaagaagagtggatgagtggatagatggatgggtgaatggatgggaggaaagaagggaggaagagaaaagaagggaaggaagaataaatgaatgcctctttcctgctcctggcctccatgttattttaccttatgtttttcgtttccctagcaaatttccaccgcaaagcatcagtgatcatggtagacgagctgctgtcagcctacccacaccagctttccttctctgaggctggccttcgaatcatgataaccagccactttccccccaagacccggctctccatggccagtcgcatgttgatcaatgaggtacctgggaaagcactgtccactgcccactggacaggggtgggaaactctgggaaggagagaaggtttcttgtttgaaagaagaagcacctaactcaaagtttaacaccgcagcatccctcagccatttcctaatcttagttccctgggccagctgtatatctggcccttgctcttccctccacgtgttgagacatggactaatttccatttatatagaaaactcccctgttccttctccctttcacccacatttttcttctattcttccatttgaataaagccccctgatatgaacttgcacagaaattgtttctaactaagggttaccttagtttaaagtaatccagagtccctgacttgaattttgctgtgcattccttttctggaatatagccttattgatacactagaccaaacacagttgtgcagctttctcacatagggacccaggaactcctgcagtctggggaagaaagatgacatcacagtgcacagagtgtcaaggaactgcacatcccctaagaactttcctctaaagggatttgcaagttctgatgggtcataaaagactaatctttcctcccagatggaagttgtctggagttggttatcacattgagaggccccttaaaacttgactccagggtcttctggaagcatatcgtcagctgccagggaaagatcccaacagctcatgttctgagtgtaaggtatttgcaatccctctgaccgtggtaagagtgcgcctttctctttccagagacaaagattgataaacagcagggcttataccaacggggaatctgaggtggccatcaaaatcccaattaagcacaccgtggagaatgggacagggcccagcagtgccccagacaggggcgtgaatgggacacggagggacgatgttgtggctgaggctggcaacgaaacagagaatgaaaatgaggacaatgagaatgatgaggaggaagaggaggacgaggatgatgatgaaggaccgtacacaccattcgacaccccctgtaagaggttctatgtctgggctggggttgggagctattttgagccactgagtagatgcccttgacttagattatctttttaccattcaattttttaaaatctctgtatgaacatgagactatgtatatcaagtctcctttgggcaggactttgttgtagaagttcaaagatggccaagatgggggtccatgatcattgcttgaaatgtgagctctttaaccaactctgttttgtggaagtgttactgaaatgtcagggatttgttctaggtcctgctcatcagtacacagaaagccagtcactgagacaacgaatattgccagggaagaaggctttaatcaggtgctgcagctgaggagataggagatcagtctcaaatccatctcgctgaccaactgcaattggggatttatatagcagggaaggaatgtagctaccttccagcaagcaggaattagggagaagtaaggaagaggaattgctccgcaggaaataggcagtccatcaggcatcacgatgaaggagagatctgactcctcattgtccagacacaatgatctggtgagtttcagttccttgatgccatctgggaggcctaagggtccatttcctgagaaaagagctcagggaagacaaatgtaagtttcgcaagttttaaagctgagagagagtcagtttttatattaattcaaaagaaactataagcatcagttctatgggacagttgggctggtttcaggggacggtcttatcttacttagctgttctgcaggaacttttggtatgaaggaagaaatgcccatgacccgtgtgggcaaggcagcttggtgcacaaaaggagaggcacgtcactcacctccacccatcccattgcacctagccgggagagctgtcctgccaaggccagcctggtggatgccaaggcctgaagaagctttcaggacctcagccaccagggtggtgtcctcctctcccaactgctgcctccaacaaggacttggttgttccagaaactgtttcaccccaccccacccattatcagagcaggtggtccaagcccaaagaattcagcctatttgctggaccttccagaagcttctggctgtttcagggaagagtacactagtttgattcacatggactgtcaagtgtgtgaggctcagtatacatgtgcagcaacctcttcgggatgtttgaatgtgcaggattatctgaagaaacgtttgattgacttgaaagcccatttaatgataggacatggtgccgagtgtcagagtcctgtgttaattttggatgcgcagggtcttgctgtgctccaggggagctcctttctgtccagaggacagcaagtaaaacttgaaccagagatgcccctgtgcccactcagggcacccaagatctcagcctcttcaagaacttatcagaaaatattcatccagattcctattcccccaggtcccttacctcccacccaaagctaaatcattacttgttagtacattatcttcatagaaaaaatgtacactcgttctttatccattttgccaccatcagatatatttcttggcaacctttcctatcaaccaagacaaaaacatcttaaggattaaatggcaaaacactcctttcctcccttgtaaacccttccattcattttctgttgctgcataacaaaatgccacatattttgcagctcaaaacaagaccctctgattagcttacagttctgtaggtcagaagtcctgctggattctgtctcacaggccgtaatgaaggtgtagccagggctacattcctttgcagaggctctgggagaaatcattaccaggcaccggttcattgcggctgtgcaggtccttgatggctgtcagctggggatgtcccactgttcctaaaagccacagagcccctccaccttcacctggatgtgtggagctcttcccgccatcattcctaatctctctggctccccttttgcttttgaggactctttgcagctagatcaggcacctgcacaatctctctacctaaaggtcaactgtgccatacaacacagcagaatcacgaggctgatagctcatcccactcacagaccctgagaatcttagggacctgtgtctagaattccacttactcaacccctgttttcagagtccgccattagctggccataaccaagctccagtaatgcttatttcgctaaaatctttcactaattaaacagtcgagccagtggaagttctgtaagtgaccaagttctatgttagcatcttgggagcccagaatccccaagtgcacccctccaggggacaatgaaagatgtgtgtgtgagatgagaccaagtctggcccagtgcctgggcctcgttactgattgggaccaagcacccctttcagatccctggttccgtatttctctcctggatgagagctaactgtggggtttcaaggtctttgaaactcgtgctcgccaccctctgtctcactgtgattaggttgcagatgatggaggcctcagaccttccagccacaccttctgggctcctgtgtatgaggagacatggctgcaggcatctcacccccaacagatgcttcacctgaggctcaggaaccccacatcccctcctgtgtccttcctgaagcacagacaggagagaagagacgatactctgtgtggtcgtaccatcccgtggggtctccatgtcattcaagggctcccagctgccaagatagaaagcagaattccaagttcttctctagcagcccttctcaccagggcttccttaatgaaatgcacgttctgattcaggaggtctagggtgaggcccgagtctgcattgctaatcaagaaccggctgccccccatcctgtgacactgacgctgctggtctgtgtgccacacttggagcacggagaggctagagacctagaggcactcagcaatcttcccagttcttctaagatgcgggaaagcctgattcagagcccgggtctgcctttgaaaagagtgggctcccccagttacaactgtctcttcccctccaccagctgctaaggaatcccaggcccagaattaggaactccattttaaggcaaggggactgaatgtccagccaggcccgcttcctggggcaggcaggcctctgcttatgggtgagaagcctgtcgggtgcttccggccagcagagggcattgagaagccagggagtcagttctgggagccccagatgggttcctatcaagtcaagttcctgtggactgaaaaagatccgtccacatgatgaggacatttttctctctcatagtcattctgcaaggcatgagtaccctgtttctggcacccagccacagtgctttcttctctcaggacttgactataatgggtatgatgattaccaagaaagtaattatttaggagtatgtgaatactgttgtgagttcatatatgtacatatatgtacagtgtgcaatttaagattgatataacatagtgttaacatgcacatgtatactgtgtacacttaatatattgtatgcatgtataatatatgtgcagatattaacatatttatgtttatatatgtatatactatattataggttatatacacacaatatacacatatacatctacacttggtatatgcacatacatacatataaacgtgcagctattgttatctcttgggtgaagaaagccttattgttgacagacagcaaaagaaaccttttcatgtgtatgtaggtaaacacatttccatgggaaagaaaaactagaaggaaatacaccaaaatataagtaggtttttccaaagcaaaattatgttttttctgtattttttactttaaaacagtgtacatttttattgccgatattatcggaacaaatgtatatgtttaggtctaggtctaaaatactgtgcaataactttttctctctttgatagaattcagctttcttcaaagctgactgaggaacataatttagaaacaaatccttttgcttgttaaagccaagtccaactcaaagggatactatcatgcttacgggccagctccggcccctggcttcagctctcagttgctggctgacttttgtgaaatcaggtaatcaccaacacatcaggtccatggtcagggaagttttttctcttaattcattgctgtacccccaggacctgcagcagtgcctggcacaaaatggcatagaggacattcacagatatttattaaatgaatgaatgaagaataaacctatcccccttgttgctctattttgacccaatggtaatagagcagaagatggaaaaatgtccagaaatgttgttgactcaaagaggaaaggaaacctttttaaaccctttattcagaaatggaaattaagggctgggcgtggtggctcatgcctgtaatcccagaactttgggatgcaaagggaggatgcggatcacctgagttcaggagttggagaccagcctggccaacatggcaaaaccccatctctactaaaaatacaaaagttagccaggcatggtggcacacgcctgtaatcctagctactcaggaggctgaggcaggagaatcacttgaacctgggaggcaaaggttgcagtgagctgagattgcaccactgcactccagcctggacaaaagagtgagactctgtctcaaaaaaaaaaaaaaaaaaaaaggaaaattaagaccagctaaaatgtgggtgatctttatttgactgcctttgttcctcaaaatcatttttaaaaaacacctttatatttgttatatttgctgcattacatttaaatatatgattcagataatgctcattgaatttctgcttttaaggttctgttgttacaaaggggcaataacttaaagaaagcatatatgtcattgaaaatgatgttttccagatataatgccctcccagtgtccagtcagaaatttttaaagcagttgataaaaactcaaaattcactggcactaacttacacttcttacaactttgtctaatcaatatcattttccaagctcttgcactcgtaaattctgacttcatttttttcttccctctttttttttattttctgaagaatgtgaaagagccaagttgggatcatttctcttcctcttcctgtgtttcttcgtaatctttgattgggtgtgtattttaaactaaaccgagttactctgtccgtttgagggcatcagccatatggaaggccgttgaggggattctaggaggttccacatgggtaaatgccttatcagcacattgcgggatttaggaatgtgccaaattccaggatgcatttgggatccaaagagctggccatatcctggattctgcagcatctggaagcccctctccaaacaactctcagccaggcttcttgatttacaaagcaagcacagtctctatgttctcatcattcacttgaccatctccaaagcttaaatctaacaagactcatagcagctaataggaaaacacttctcttttcttactattttttttgtttgtttgctttactctgtacttgtaaattggatagccttagattctcaaaaccaagtaattttctttggtctgtctgattagattgttcataataacattattactactactgttactgatatttactgaaaatgcaatataagccctgcactatccctgcctttcaatcaggtgctaaacaagtgagaagacccctgttctcatagactttattctaatttgagggagactgaaaataaattaagaaacaaccctgatggtttaagacaggaaatattcgcatgaaacaaataaaaatatttgctatgaaacaaatagaaaagctggagtgagatgatgagagttatatttagatttatctgagggctcagtgacattcgagcagtgaagtggcctgcgtgacagggcagattctgccatgagaagatccaggcagaagacctgcgagggcaaagtccttgaggcaggaaaaggcttggagtgtctgaggacagaaagttagccaagaccagggagtatgtgagcagggagagtggcaggtgcggcaaaatcaggcagtgccttacagaccatggtggggagacctgattttactctaagggcagtggaggccagtggaaggttctagaacaatttggtttttgagactctttcctctggctactggtagcaaacagatggaggtaggataggcattggagcagtagtccccgtaggaagccaggttgtcagccaggccttggtgaacctggccccagcggaggctgtggggatgatgagatggtgggaatgtcctgtcaggttgccagggttggctgtgggggataaaagaaagggaaagatcaagaatgactcccaggattttgacaggaacgacttgtgagctcatgttgtcccagccctcatcctaatatcatctcatttaattctcccagcaactctgtgagctcggtgctgctgtatacacattttcacagatgaagaaactgaggtgtagagagtttaattaactgagtctttcaactcataagccacagagcagggaccggagcccagcaccatctaatgagaaacccctctgcctcccatagacactgtgcctcggccctttaagagaggccagagggtgccagaaataatgttagatactttttctatctatgcagttttaagaaactatttggagattggtaggatatatgaaacaaatactggatactggtctaaaattataaaatacattttattaaacatttaattactgttcaaatgttataatataaaaattcctccttaactctggtgggaatataaaatggttcaatcattttggaaaactggcagtttcttataaagttaaataaatacccaccttatgactcagcaattttcctgggtcttcgtccaagagagatgaaacatgaccacaaaaagacttgtacaacaatgttcatagtcacctggcttgtaataccctcaaactggcaacaaacaaatgctcacccaccgccatatggataacaaatcgtagcacattcataggagggaatactacacagcaattaaaaggaatggatcacgcaacatgaatgaatctcaatcacattatgttgaaaagaagaaggaaggcacgaaaacatcctatatggttttatttgaagttggagaacagtaaaaacaatatctatggtggtagagggtgagggtttgactagaaagaggcacagcaaactttctggaaggtagaggcactgtgtatctggattgcattgaggaatacatggaaatatgtatgcatatttatttctagaggtgaattagcagttaatcaggttagtaatacaggtctagggagagccttcaaatcctctttgaagattccggcgcgctgaccgacgatgctgagaaattccaccaggtggcgctgcgtccgctgacgctttattatcgggcgaaaacgtggaaaacagaagcccactggaggtcttcctagctccccacccccatttcgaccccctgcacctacacacattccacctcttttttgacctgagtatcctcctctcttttcccacctggccatctgccaaaccatccccctagcctggtattactaagaagtgattcaccctctcatttcggagacctaatcagcaggtgggcagtgggtaattttttttttaattctgtttggtgttgcatgtcaggtttcgttggtgatggaaagtcatttgaatgttttagaaaaagagcaatataataaggtttaattctggggaaagcagtacagacacttggcagagcaaagaaataaagctaactggggttctttgttattttttttttatttctttttggcctttttcatttttccagcgggtaaactggaaacagtgaaatgggcgttcacctggccgctgagtttcgtcttatacttcactgtacccaactgcaacaagccgcgctgggagaaatggttcatggtgacgtttgcttcctccacgctgtggatcgcagccttctcctacatgatggtgtggatggtgagtgcaatcgggaccccatggcactgttaaatctctttagagaataaagaagggaataagagtcagggtttcagccgataactgtactagtcagctattgctacaataagctgcacaacgaaccactcctaaacttagtagtttagaattgcaggcatcgattctcctgctcacacgtcttcatgttgactgtggattcattaatcttagctgggacctgctatgcagctctgcttcaggcttcagggtggtcatgtttgattcaggcagcaggtggggtccatgtctactccacgtgtctgctcattttctttgtaccagaggctagctacctggggtatgctcttctcacagtgcatcattagaatgcaagagagtacgtggaaacacgaaatgcctccaggatcttcgcctggccctgacttaccatcacgtccacacacattttactggccaagccccacatcaatggcatgggggaagtgtactccacctgctccagtgggaagaacagccatgtcacagggcaaaggacatggaggaaaggcacaaagaattgggaaatgatgatcaatccctatcggcatcttagtttcttcagccagacaatgaggcattgtatgaggtgatcactcaagggtcccttctgaggctaaaataatgactcagtgattcacattggttgattgacattgactgatattagttgattgacatcgattcagtggctttgaccttaacaaagccattttaggaaacccagccttccagaatgcattacccatttatggctatactttttaactggggagaaattccaaatcattaggattggacagaaattaaaaagcatggcaaaatgatgcaaatccaaattaatcttgccttgagtgttggatagaaatgtaatataaattctggagaattaaactcaagagctaaaaagaaggttatgaaaaagatattttggtaagaacaaaaatacccagaaaaattttgctacatgggttgcaaatttgtaaacctgacacaactaattcataatcatctctttcctcaatatcacaaacatttttttaaaacccaagttttatagccaggggtttctccctcatcctgcattcactaatgttttcatctgacatatgcaccaagagccacctcctatctggatttgggggacagtgttggctgtccctgaccttaaggtgctacatgattttctgtgcagccccctaaccagcgggctaactgacctgactcatctgaggttcaacttccttctgtttgcttccttttcctccagtggaggttctaataagtcccaatcaatgcccaggagtagggagaaaactaggagaagccggagacctggtcccagccacctgagcagtctgctcccctgaactccagacccagccacaaacatgatcatgaaaatgatgaaccagaggccaagactggctgagccaaaccaggttcctacagggactgagctgagggttaaaaaggaaaaacaaggtttggccaggacgctggtagctccatttgatccagagcgacaaaatagaaacagcgtgtgtttctgcagctcactttcctccctggagaccggaagtcagaaagccctgtggccaccccaggttaaattctgttcagttctgctcagtactgaacagaaatgagctgcattctctgtctgaaaggaggcaaggcaagcatctctatggatttcactcacatccccccaatctttgaacagggaaggagcgattgtggcctttggagtgaagtcagggttccgggtgtaggtgtctctcaagggctggcccaggaggaactgtgagaagaatgtgctccttacaacatgtgctttgcatttcctgtaattttatggcaagtgagggagatccagtggcatcctaaaatgacctgacagtttcaactcttgtgagttatcttctccttgggcccacatgcagggaatgtgtctctttttccacttacctctttttttgccaccagctccctcatcatctgcctcatcaactgcttttgtttttttaagcatgcttgcatttgctttttctatatttgcataaatttaagcggtacaagtaaatttgttacatggatatattgtgtgatggaagtgacgaagtcctgactttagtgtatccatgactgaaataatgttcatcgtacccattaagtaatttctcgtcacccaccccacttcattccgtgctgaatttaaactgaggtggcctctggccttcctgtttttcagtctccagggaggaaattgagatgtagaaacacaacatttctgcccccaatccttccaagactccattgcctatcattccacaccccatgtccaagtgtacacattacgtagcacccacttatgagtgagaacatgtggagtttgactttctgtgtctgagctgtttcacttaagatgatggtccccagaagctattatagtgaagaagatgttgacaaggacagcaaattgctaccaagcttcaaggaatagagaaaaggaaatgctagttatggctttcccctttttttccttttcttttttttttttttttttgtgagacagggtctcactgtgttgccgaggctggagtacaatggcactatcacagctcatcgcagcctgaacctcctgggctcaagccatcctcctgcctcagcctctcaaggagctgggaccacagacatacaccaccatgcccagctaatttttaaaattttttgtggagacaaggtctcactatgttgctcacgctggtctagaacttttgaacttaagcaatcctctcaacttggcctcccagagtgataggattacaggcctgagccaccgtgcccaaccttagagttatgccttttctaacaagtatggatactgtcaaatccagcccctttgcagttcttctaaattcccattgtgcatcctccctgacatggacgctcaaattccaagcaaagcatccatccattctggatgcctcagggccacccgtagttcaaatattctgtcccaatattgcctttttcccagaaattctattttctcttctcaaaccacccgcctcaccggaagagaacaagtgaaaaggccaatgttttgttggaaagtttgggtcctattacagcaccgtcccctgacctgcagccccggtcggcatccacatagtgtttgtcaccctctgtattgatacagagagcagacattgcaccccacagagatagcccagaccatagcctgttgtgagtctccatcagaagaatcatgggcaggtggggcttgaggtgaccctcagctgaccacctcttcctgctccttctaggtcacaatcattggttacaccctggggattcctgacgtcatcatggggatcaccttcctggctgctgggaccagcgtgcctgactgcatggccagcctcattgtggccagacaaggtgggacttccagtggcaatggggaaggagggagggagggaggaggagagggagggaagaagggagggagggagggagggaaggaaggcaggagggagaagagaaagggagggagaagagaaggaaagagggagggagggagtgaaggaaagaaggaaggaagggaggaagtcaggcgggcaggcgggcctctctacctgggggacccacctggtaattaacagggtttggaaggagggagggtgatgccgtgttggttgaaaggtttcctgggctcagaagaacagagaaataatccagaaggtcctacccttgaggaaagcaaagacatttcctaggtagcacccatagccccttctggaggctgtatcaccatcctcctattattcaaagtagtaggaaatgtactgacagctaacctttactgagtaaaacatgatagatgcactatcttatttgatttaaacaacagctctgtgaaataagcacaatcatacccccattttatggacaagaaaattgaggcttagagaggacaaacctcatccctaaggctgacccacctgcagtgccctctaagtgacaggtcccagaggtcagttttcagagtgtgacagatccttccctccttcaaagccaagctcacaggctcacagcttaccttcccaaacagattccccagatggccacacccttctgtagcactcattctgacgcatctgcctgatttatgctggagggcatttgtttcaaacaaatgtgtgttgagctacaaaacttagctcagtgtcccatagacatcctcatgaagctctactgttgtctacactattgttcagttattccgaagaaggactggagacagtacagggcagttggaagatgacccagtatgcaggtgtgagctcgggagtcactttctagaatggttgagtttattcctttccataagggtgtctcagaatctccagaatccttgaaaccatctgtattagtgcgtctcacattgctgtaaagaaatacctgaggctgagtaatttatcaaaaaagagctctaactggctgatggttctgcaggctgtacaagaagcatgccagcatctgctcggcttctggggaggcctcaggaaacttccagtcatggtggaaggtgaacggggagcaggcatgtcttacacagcaggagcaagagggtggggggaggtgctacacatgtttaaataaccagatctcacgagatctcactcactatcacaaagccggtaccaatgggggatggtgttaaaccattcataagaaaccacccccataatccaatcacttcccgccaagcctcacctccaacactggggactacaatccacatgagattttgtggggacacagacacaaagcctatcactgtatttggttttttgaatcacttatattcaatcagtgatgatatttgaagtaaaggtcaaccattcaatagaacgtgtgtttctctgttttataattcatgtcatcctttcacatgggtgatggccttgaaagagaagcacatatgtgagcttgcagaaccactctctggctgtgagactaaaggcttgggagagtcctgtgtggggcccctgggttcccttccctctcttaagtgacctcttgtccctgcagggatgggggacatggctgtgtccaactccattgggagcaacgtgtttgacatcctgattggcctcggtctcccctgggctctgcagaccctggctgtggattacggatcctacgtaagtggttttctccaggacttctcctgaaatccagggctacgtgactgtgttttaacagccttggccacagggtctttgtctcggggaaaaaggggtgtagaaatcgtaatattgagggggaaacaaattctccttgtcaaaggccttactagtcaggcttgcagggacattcaggactttagagcaggggccagcaaactttttctgtcgaggggcaaatactaaatattttaggctttgtgggccagaggatgtttatacagctattcagctttgctgctgtagcagaaaaacggccatagacaataaataaccaaacgggcatgtctgtttcaatacaactttcctaacagaaaccgaagtttgaattttatatcatttttatatgtcatgatatataacacttcttttgatttttgttccaaccatttaaatatgtaaaaaccattcttcactcatggactatgcagaaacaattggtgggccaaatttggcccatgggtcataacttgccaacccctactttagtgtacttagacttgcttcaccttattacaggctaagtgattcatgtcagagaaacactggagagatgccatccaggctggccactgaaagggcaacgccctggcggggagagggggagagggtcacagaattccaaataactcttctaagttctgcagcccacagggtgagacttttgcagtcaggctcttatgaattgactcacatcagccaaattcacaagaatttgatgtctaggatagaatgtcaacagatggtagtaacagatggtaagatatataagggctgtgcagaaagcatgtgcttattttggatgatatgttctctatattcctggagaaatatcttatgtgggaattattttgggcatcctatgaccatcctctaattcagggtttcaggagtactcacagattacattcatggctaaggtttattatagcacaggatatgggataaaaggagctggaaaatgaaatgcatcaggagaagcccagcgtggtcagctgcaggcctctaattccttccctaatgagtcacacaggaagtgctttctcccttgcaggaaacatgcatgagatgtctctatccagggaagtccactggaggctgaggcttttggggagggctggtcaagtaggcacattcctgctgcatgaacagccatgatgcctgaatctcagaaccccagcatagataccaggtagacattataaagtttgggaaatgatcgtgacaaattggtacagcatggcctatcgcttctggggtacaaaccaatgtcatcaattgtagcatcccaagggtcacattcacaggggttggccaaaggtcaaccatggttcaggactctcctggaggtatgcaaggattaaataaccaggcctgctgtgtcaacaactttcgcagagaaggtcaaattatggttttatttttcagaataagtgttgctagctactgtattaccaaaaaccccaaaattccactggagtagcccaacacgggattggttttttactcaaattccactgcagatgttcccatcctggcagctctcatgtctcttccaagcagaaactcagggtttgtggcacagtccatccagtggttctaccatcttgaagtccttctcccatagctacacagaaagcagagaaggcaagggcatggaatattgtgtagatcactttctgatgaggcctggaagtggtgtctgtcccaactgttcccatcccactgtccacataagttacatgtacccacttggatgcaagaaggatccaggtaattaggttagtgttgtgcctgaaattcatatagccacatgtggcttgtggctgactgttggaccctgtagctctagaggattaaatgacaatcacccagagtctaatccatagataactattgttaacatttcagcatatttttctttctctaggttactttgtatagcaaagatcatcctatgtaggcaattttatacattgctttttatacttcctgttatatcaaacgttttttcctcaaaatctcattggaaacatcatcttcaaggtgacctattattacagtatattccaaagtgtacttaatcatgctgctgctcttggacacttatgttgattcaaacctttcactgttgtaagtagtgacaccacagacatctttgtacattaacctataggttttagagttttacctaaatctatacttttcaagttaacatttcaagttcttctttagatgatttttctcagtgttagaaaagttatataaaagattgttttccagaatgacaatattttttacatggttatttgtccagattcattcctgaagttttgggacagctttatgacaccctcatatcctgaccacaggaagccccatgagggctgacattgagcctttcacatgtctgtcttcttcatggcacacagtatggggcaggcacatactcaagccatgaaaagcatgttgaataaatgggaatccatgtttagctcttccatggcctttgcattcactttcaccagcagtgaaagttacctttcatgaattagagggacacttcaggtccaggctgagacacgagggcatgaataacctcgtaatttggtgccccccgaaacatatttttattaaaaaaaaacattaattcagcatttattttcaagatgagataaatgcttcatgagcaaagggtggagatgggagattactggttccttcagtaatgcagtcttctcttgttatcaagaagttcagctctgaactcaaacttgcatatcatggtctgaacaaaagcttcgcagttaacacaacctaacttccttaaaaaatatttagtggctttctgtctctactcagtcatacgtgacaaggatgccaatgaagatactcctcagcccaactcagagtgctgcatgcaggggtctgatgaacccgttggcagtccatctggtttactcctcagcttgtttcacttccccattgacctcttatcaaagttatgaggaattaaaaatcagaactatctgaattttaactgctttttgtccctctgttgaggactagaagacaatggctaaaaaacagacatcaaaaagaagaagaaaaaaaaacctgggctctaaacaacctgaagaattcatccctgaataatatattttcaccaggatgactctccagtgagggagggacaggcaggagcagagaatgagaaactttcaatgtccttcagatccatgatgttatttcttattttactttgattaaaggggacaatcatagaaggtgaaatcaaaaactttcaaaacaaaactaaaactcaccccagaagcaaaccagtttatcttactaactttgaaatcttcctgactagacatggatatcaggcctgaaattccaactcgattcagcacaccataaatcattctcctaatgatctctcctcctttcctccccttctgacattttcccaatactctttagagaacaaaaaaaattaaacattattcttctatcagtaattcccagagctatgaaagtatactctttccagatctcaatgtctactgacacggtgacatcatgaaaacaaaaattcaggctttagtggatgtttggtccaaattcatgtttttcacctgaagatgacataattggatcactctggtcattctgctggaattatacaagggccacattaagtcttgaaattgaagatctactttatccttgaagtcaagggggaaatgcaggagaagaaaccactctggcttattatgatcaatagccatgacatgcacaagagtcctcttgggggagacttggttaggaagactttggagaaaggtgtgtcatgttgtgtttccatccaaatgctgctgtttctgtaataagtgcaaaaaaaaaaaaaatcattttatgctggggatacaaacatccaatgcagaccactcttttgaaagtagaaaatcagtaatataatcaataaacagtttatgaactccagggaagtcaaggagattccatttgatatatggtgtgaggtagggattcaattttattatttggcacatagatatatagttgtttcagcaccgtctgttgaaaaggagatttcattttgagctttaaaaattcaatggaaaaatttctggttagcttatttttcagtaataatcacaacctaggaactactaggaagccatgatttggttaaagctgtgaatgttgcatttcataagtaatgctaacttccactatttggaaaagtttatcttgagtcaagactaaaatgtaaatgaacaagaaacagggaaggatcaacctggtgaactgaatcggggagtgagggtcataaaatcagccccagatcctagtggcatgctttaatattctgcattctccttattctactcaagtagttgctctccttccttgagagggcatttaataagggaagaatccctatgaagagaagaaccccaaatgctccccacatcctaaatcttctaatccttctaagctctgcccaaatacatcctcacactgcacataatctctttccacatccctgctggcccatccacgttcttccttgtttcacagttattaaccacatctctctctgctgttagaatctgagtttaagacctcatccacttaatgtctgccactcacactgcaccagtatccatctgacacatagaaggacattttatttgtttaaatagagaataaattttattttttcaactgcagcagcaagcaatccctttgtacatcaataactcctgagatctttgccatgtgtcagcccagttaaataatttatattaatggtggtgatcctgagtcattcaagaaaaagttaagttagatctcatatcctctaggataagcatcaagtgtatgatctatttcaaagtgaaatatttcatcaaaaatagttaaggaactagcctatagaaaggtagactttaattttccagaagcttttgcttgtacagactatgcttctttgactaataatgttagatcaaaatagtaacagtatttggcccaaccaaacaatgccttttggtttgcttggaagctggggttcccagaaaatggcactctgaacccagactacctcacagagggggttacaggggccccaaccaagggcttctttctttctctagctcatccttcaggtatcaatatagatgttgaactgggatttcccaagcctggaccagatgtcatgcctgtgttcagcagttctcatcaaagtgcttacctttaccccttggtctgagtctccccctggagaagtgacctccctgaagacaggaactgtgctcctctatgcatttattattttgtttgtgcctagcgcagtgcttggcacttggaacatattccacaaatatttgttggatggatggatggatggatggagagatggatggatggatggagagatggatggatggatagatggatggaggaacatgtgtgagcaaagaagaacagagcagtagggtgacttgagaagagagtaggggggcaagcacaacagcaaaaagaatagctagaattcactgagcatctactctgcaccaggcactgtaggaacactgtattcgcatggtctcatctaatccttccaacgcctatgtaagggaatgattattctttcaaccagggcttattatgcacccactatatgccaggaacttgtcaaggcaatagggattcagaagtgaacaaggtagacaagacctttcctcttagagtatacattgagtggggaaggatagacagtacatacgtgaacaaatgcctgattgcactaacttcagaggacatctgccttatgcagatgatgagttgaagtgatgttttagagagagaggtgcagatgtcactctgtatttactgaacaggagattaagttctgtgtggagtcatgagtgacaagagccagccatgggaagagaggggtgtgtggcgagcaggggagcattctgagaaggaacagtacttgcaaaggcgtcgaggcaggatgtgtcctagaacaggagacatgctgggcagaggtagtgcagagtaaggtgggcaggggtcacactgggccaccaagactggtcacagggctcaggtttcatgctaaatccaatatagttcttagctcagttctgcagattaggaaaccaaggcacagcggttaaatcacacagccagaaagaggcagagaggagtgctttcctcaaagcactgacaactattgccaaagcaaatcatgccacagcagtcacccatgcataactctgggctcagaggagaaatttcagaccagatccatccctgagtttgaatctttgctaaaagacagggcagggtctgcttattaatgcttaggtggcttcttcaactttatataaagaagtgaagagctagaaggggaggaaattctgatccccagttttctatcctaaaagtaccaacaggcataatgggggctgcactccttgctgtcctgggccatggtaactgatatttctacagggattttctgtctgatggttggaggaacctctctggatcctttgttcagtccctggtccctccctggctctctttgggtgtcttcaagtggtcgattcctcatgctcagccacactgggcagggtgggggacatcaccatggagctcatgccgaaatgcagacgttatttggaaaaataatcccaggttcatgaaaaagcaaatctagggcttatttgcttgagagcattttgatctgccctcttctccaccacaagcttttcctatgagaggctttatttccaaaacgacactcaaaagcctctttcatgtagcatggtagtgaccgcatgacatctttctgcatctctgacatcagaaccgagcagctactgtgggtttaatggccctcctaacctcacaagggacctgccaacaattttgagcaattttttcatctcatctagatgggatttccaagtcataattatctgataattaccatccggatggctgttttgtgcatggcattaggtttaagcatttggcagggaaggatgaatgcagttttacagattttgacatttcttaatactctgtggcttgctcagaaggcagctagttacctaagtgcccaaaataagaaatctttctaaaagtcaaagtttggaaaatgagcacttcttgttccattatggtgatgaacgtctgttccacaagctttaagagagctgagaaagtcaccatgcaggctccaggaagccagggcaaaactcatatttctagctagggcttagaaatgtaaaataaatctgagatgcaatggagggagggtgtctgtctctctctctccaagcaagagaccaccagagtccagaaacaacagagacaaaaagaagagctgtccagaaatattctcaccccacactgtctgcctggtttattctttctttgacaaagtgttaattgagtgcctactatgtgctatgctggtaaccactggagatggtgcagtaagcaagacagtcagaggcctatgctcctggacctacagctatggaaggagagatttgcacaagcaattccaaaacaagacgtgatgcctgctctcctaagggctgcctatacagaagtttaggtagtgtgtggcagtgattgggggatctggaatgctggggaggaaatgacagttattctgagaatccaagattatcaggacaagcaggtggagagaggtgagaaaatttatttccaaacagaaataagagcttgtagaataccaagatatgggaaaacttgttgcactgaagcacccaagggctgcttctgtggctggggggagtatgggaggggtgaggagttggggaactgaaacaaagtggcagaaatgaaactagagacagagaagctgcatggtaaaggccatggtaatggaaagaataaagggtacatgagaaggagaggtacggtcatgtgtgccttttagaaaggacgttctgacaattccgtagagaaagcactggagcctgacaagactgatggcaacaagttcagctacggggcatttgcaggagagagagaatagggtgattggattaggatggttgtatctgttagctatggttaccctaatgctaagtaacaaaaggcatgcatccattagcgtatatatctcagtcatacctttgtggctgacaagtgtgtggctgctctgggcttggctgcaggcttcatatgagtctgctccatgtgcctctcattctctttggaccactggcttctcaagacacagtcttctcatgatgtgtctcaaagaagacacatcatgttttgctcttctcaaagcaagagcacaagaagacgcacccagcttcggaaacacattatggattcaggctcatatcaggtcagctaacaccattggccaaagagtatcacacagccaagccccaaatcaggaagcagaaaaatgcatccacccaccatgaggctatggaaagtgtgtggacataaaacctattacagggagaggaggtgagaccagcagttcactctgcctccacagtagcggtaaaactggagatcagtggaaagctaagcaagagactacagaaaaaaataacaggacctggcaattagtttaactttagcccctaaacagctgttcatgcggaagtaagtcgggaaaggcaaggattttgtaagctattgcaaacttttcaggtgttattataactacgattgaggattttagcaaggcaatggcatgattcactttacattttaagattacactggatgctctttctaaatgcataggaggcaagagtggatgaggggagacaggtcaaggagctgatgacaaaaagagattctttttaaggaagaattaataagattttctgacagttgtatggagagaatgagaaggagaataatcataagtaacatgtgattctttgcttgggcaactaagtgtattgtgatgccattcatggagatggggagacaagctgggagatgaggaacacatttaagatgacataccaaatgttccatttaggacaaataaagtttgatatgtttgcgggtcacctgaatggagatattaagtaggtagtggaaatgataggtctgaagttcagaggcaaggtcttggttgcagatatgaattcgggagtcaagagcattaactgcaagtaacaacgtaagaaggtaagtgtagatagaggagagggcctagaacatgtcgtgatgttggatgggggaagaaacaaacattcactgaaggagactgaggaagggccagccagggacagggagaatcagaagaaagggggccacacagccagaagaaagttacaaggatgttggagcagccaagtatatcagaccttgtccaaggtccttcttctaaggccagcgctttcaaccaaccatcacctcctccaagaagcctaccctcagccaaatttagtacctgtatgacagcatgggggtatattctatgatgtgtatgcctcccccttaactccctgagggcagaaactgtatcttactcaacttgtgctccttaacacctagcagagggctttctgtggaatgaatcaatgaacccatcagttcttgatgtctcccacgtctttcattctcaccttgtatggcaaccattccgaattcaggctcccagcaccaggacactgctccctctgctagaaccagtcttcccttttctgcaaattccttcccacgcccccagggacagtagggtgctggagccaactcatatagcctccagagaagctatcatgtgcagctcttcatagcttcctctggcgatgccacgttggtagcttgaaatcagccatgatggcagtatttacaccacggaaacaggaccgtgtcagaagaccactgctagggtctcctacaaactatccccacaggacctagataggtaacttggggataatgtggtgatgtcttaatgaacgaggcttctcaaggttattcaaacagagctcctgggagcaaaagtatcaccacccaatccccttgatcttgaccattgtgtttcaggctctatgttaggaaaattaggtgatgcctgagggaaggaagggttcttccagatcctactgtggaagggcttacctggaaagctgaatcagtctctctgttcatcacagtttaggtccctcagaaactattcatttctaagaggaggatccagggtgaagagtttattgagggggagcagtatgagagtggagaggaagaaggagggaaggcagcccacagcggctgtgctagcaagactattaccacagtgggcaatcagggctgactcccatagtgggagctctgggaaacagaggacagcctctgtctcagaatgactccatccgaggggcaagggagctggggggtttattcacccactcctcagagtcactggtggagaacagcttctagaattgttcatttcttggcacttctttggtttaggagaaagtcctaaggcaacgaggcaggaatggctgttgggaggcagctggcacccaccaaaatagcacctcagggagatggggggatgtgggtgagtactgctggcagctgctgcaggggcatctgtgattcttaaagttcattcaggactcttacaaacatggtaggcagacatggtgaaaccctgtccctactaaaaacacaaaaattagccgagcgtggtggcacacacctatagtcccagctactcgggaggctgaggcaggagaatcacttgaacccaggaggtggaagtcgcagtgaactgagatcatgccactgcactccagcctgggtgacacagcaagactccatctcagaaaaaaaaagtgctaggcaggaaaggtccagatgcacttctgagggttcttagagggtaaagggaggctttaccctggctttctgctgtgcctggcagagtacaacaaaaagtgagaatttagggtccaaagtccaactctaaatgcagacctgacccctcaccagcttcgtaaacttgactaagtggtttaacctctctgagcctcagttgtctcatctttcaaatggggagaacaaaacccactttgcatatttcatgagtggccaccagaactaaatgcactattgtactaaatgactaaaggacttagggatgcaactgtcattaaattgcttcttttctgtgggctgggtcactgtcttacctcatttaattgttcaaacaaagagattgccacccagtgatattttacaatgtaaagccacagctgggaacatccatttggaaactacacccaaacaagtgtaaaactacccaaataagaaaatgtgaaatgacatgccacatatgttccaagttagaaataaattagcaaaaatccaggggcttcttatttttcctaaaggaatttgttggttgggtcaagctgaccacaaactagagagagattttaaactgtagtattagggaaatcagaatcttttagggtgggggtgttggctctccaaaggtaatagggttcaaagaactgttttatgagcagcaagtatgcatgaaacttggtatgaatgagtatctgtgtctgcatccgtactaaaaaatatacatgcactgtgggctaaatccctgttgactttggaactagccaccctcctgtttcctccacaacaactgccaagagggaattagagaatgaaaatgcatgcttcttaaggcaagaaatgaaaacagcattaaatgtcaggactgaacaatctgagatgtgcctcacatgctctcagatcagcattgccttgaagattttctgcattggcacttaatgttccttgcgtctttgaggcagggaggagggagatgatctagttcaacactgtgcaggcctgtccaaaggtcattcacggatgagaagggtttggtgatatcatttggcttagcatgcctcaagaaagtgttttactgccttcagggaaagttactgggatgatgaaaatgttttttatttttgttgaagtgtggattacatgagtataggtatttgtcaaaactcatccagtagtaagaacacttaagatctgtgcattttactctatgcaaattatgcctcaattaaaaagcaatttggttccctcttgctttgttacttgcggagatcggcttaaagccaaccctcaccatggcctgtctcccaatcaactctccactcttgccctttgctatgcagtctcactgcctcccagtatgcacatgcagtctcactgcctcccagtatgcacatgcatgcacacatgcagacacacacagacaaaggcacataaacacatgcacacaggcagacacatgcaggcaaacacacacacacacatccacacatgcaaacatgcaggcaaacgtacacacacacgcatccacacatgcaaacatgcaggcaaacgcacacacacatgcagacacacgcaggcaaatgtgcacacacacatgcacacatgcaaacatatgcatgcaaacacgcacacacatgcacacatacaaacgcacacacatgcatgcacacgtgcaaacataccacacacatgcatgcacacatgcaagcaaacgcacacatatccacacatgcaaacacacaggcaaatgcacacacacatgcaaacacatgcaggcaaacgcgtgcacacacacacatgcacaaatgcaaacacatgcaggcaaatgcacacacgtgcatgcaaacatgcaggcaaacacacacatgcatgcaaacatgcaaacatgcaggcaaacgcacacacgtgcatgctcacatgcaaacacatgcacacaaacacacacacccatgctcagaatcaccagcagatgcttttttcttttttttttttcgacaagagtttcactctgtcgccaggctggagtgcagtggcttgatctcagctcactgcaacctccgcttccaaggttcaagcaattctcctgcttcagcctcccaagtagctggaactacaggtacgcatcgccatgcccagctaatttttgtgttttgagtagagacaggttttcaccatgttggccaggatggtcttgatctcttgacctcgtgatctgcccgctttggcctcccaaagtgctagggttacaggtgtgagctaccgcgcctggccgcagatgctcattttgtttgtttgtttggggtagggttttgctctgccacccaggctggagtgcagtggtgggatcacagctcactgtagcctcgaccttcccagctcaagtgatcctcccacctcaccctttcaagtagctgggactatagagacactccaacagaactggctaatttttatttttattttttgtagagttgaggtctcactatgttgcccaggctggtctttaactcctagattcaggcaacccacctacatcaccttcccaaagtgctagaattgcaggcataagtcaccacgcctggcccagatgctcatttaaacatacagtatgtggagccagggactggaggggtgagggaattaggtgctagagtgaggaaaaactcacgagccaggcatctgccctctgagcatttggacctgctgttctggtaagaacatgccccaacccaagcacaagcaggacgacatcagcaccatagggacaatagtgaacttggaagaggcaaaaggacttatggcaggatgggcagagtagaggtgggaaggaggtgagacccccacctagctagaccgaaagtctcaaagagggcacaggagtgtgcttaaggtgctgactacagagaaggggtgctaggatatgagacagtgacatgaggtccttagcagagctcctggccctcctcgatcttcattaatggctagcctgtcaggaaggaggagccctacaggcctcttttcattttgcttttgaattataaaagtaatacacattaatagcccaaaactggaagtggcccagatgtccatcaacaggagcataattaaacacaccgtggcatatttacactgctgtaaaaataaatgagctgttgatgcaatgaaaacattgaaggagtctttaaaaatgatgcggatataaaagagtacacgctgcaggattccattgctatgaagctctaggacaggctgaactgccttgtggtagagaaacagggcagtgcctgcctcaggcaaggcttacagaagggcacctgagaactttctggaatgacagaagtgttctgagccatggtagagtttgagttacatgggtgtatgcatttctcagaacctgttgaatggtacaattttgtggtgggaattttaccatgtaaaatggcatctaagaataaaagacccatgaattgtgaatgaactctacttaatgagatgcaggcaggagtgctgaggggtgaaatggcctggtctctgcagtttactttgaagttcccacaagcacacgtggacatgccctgctcttaaaaaaataagatggtataattcttccaactttcctgaatgcttgaaaacttccatagcagcatgctgggtttaaaaacactacatagactcaaaataatttaagtaaagtggggaagggagagagagtacattgggcagagaccacattgcttctggaacattatccagggagtggcatccggggtctctctgcttccaacctcactctgaccagtccctgctgccccacagaacactggcctccttataatgcatattccaaatgagacttcatggacatgccttattcattcatcagttacgttttaagcacgtggtctgtgcccagccctctgccaggtggagggtaaagtcagacgtggttcctacccttgcggtgtctgtaatctagtaagctattgttcagtgataggtttagaaaagaagcagcctcgggtgcaaggaagtggacccagcccccaattattcagaaggtattacacaccaggccctgttcaacagttttaacgtggattaattcagttcaacctcataagcaccaacaaagcaggaactgtattatccccattttacactttgaaaaactgaggcttagagaagttcagttacccatccatgatgatacagcaagtgaatgaccaagaagagattcaaaacccaggaagttagctctggagtccatgccttaaaccagagggttgcaaacattttctacaaggggccagagaggaaatattttaagccctgtggatcatgctgtctccatcaaaaccactcagctcagctgctgtcgtgtgaaaatagccattgatgatacataaatgaatgaactgagttccaataaaattttatttacaaagacaggctggagccagatgccgtggctcatgcttgtaattccagcactttgggaggccaatgctggaggattgcttgaggccaggagtttgagaccagcctgagcaacatagcaagatcctatctttacaaacaacaacaacaaattagctaggcatagtggtgtgtgcctatagtcccagctacttgggaggctaaggcaggaggatcacttgggcacaggagttcaaagctacagtgagctatgatttcacctctgcactccagcctggacaacacaatgagacccagtctctaaaaaaaaaaaaaaaaaaaaacaacaaaaagaggcaatggcaatgactcctgccccaaaccatccatagctgcagcagctgggagatgtttgagctgggccagaaggcagctgaaggagccctcattcctgcctgtcacatcctggtggaagtacaagggtcagacagcaaggagtaaatacaggctttgagagcccaggtctctaacaatgaaaacacaaaaatacacccctgggtgtgtgtagtagttcatgaccaaaggaaggccatagagaaaaaggtgagaagttaaaaacacagcaactccacaaaagagtgagttgcctttggcctctggaaccagatttagaatttcagccacactgttcttcgagatttcatgtgaacataggaagagtaaagttcaaaagctttggtttaacaggattccttttgaaaatgtttggccaaagggaattttcctgctaggagctttgctgtcactggctcttggtttcttaagggcatgaaatcactttactaagttcttgttgctgacaagggtttgaccctggagctcagagggcaagctgtgctggaaatgcattgcccctcttagaagatatctgtatgcgcagtgctgaaagttaagagctcaaaaggattcctgagtgtttatctacagtttcacatctacccaagggtgactgaggatagctccaagagcctcttcctctctcctaggggttgccatcttgctctgaggagcccatctctcccattcaacattgaccagaacacaggggattatcatagtcagtgtggacagaatatttggaggaagaaaatcttcagtacaacccatttgcgatgcagtcttgtatgctggcctctttataccaacccagctgatgaaagtaggaaagtctatccgcagtcaggttgagtgtgtgcatgaagttaagccaccagctggactgcgacggggccgatctgccatttttccacactgaattaaccaggttaagccattgctctagtgtcacagagatatgacttgagtcttcctttattctcgggaaggcatttggtggcagggaagcatgttccagctgggggccagcaaatggttgactcacagggattgcaagtcacgagagaaagagtccagctcaatccctctgtgacaggacatcattaagtcacatcttcacagaaagggttggctgtttagggcgtatggtgtccctattttctgtcctgtcagaaaataaacctgacacacccacctatggagactccttcccatatgcacactccagtagtgaactggtgcagtcatgccaagaggtaccttaaaccctgtcagaagggcccagaaccactcctactcgataattaccacttagttgtctaacagaaacaatgcacaaatcaaccagcctcactttcccttcccaagaacgtagagaagcttttcactccctgcaggagagtgtacattggttggggtctgtagtcctcaaacctgaatgcacacaagcatttccaagaaaacatgtgaaaaatgaatgtcaagatcccttccacagaacccttggagaacagaagtggatctgagctttatgctttctctaaatcagtggttcttaaactttcctgtgcatcagaatcacctggagttaaagcacagattcttgggccctgccccagggtttctgattcaggagttctgggtggggcctgagatcctgcatttctaacaagttcccgagagctgctgccgctgctggccccaaaaccaccctctgagaaccactgctctaaggaatctcttctattttggggcagccggcctcatgactttggtcaaaggcagaagcagtgtcttctctacatcatgaaagaaactatttggcctttgtcagccaagtcagcaccccagtactctctacctgctctgcttgatattatagccacaaccacatgtggctctttaaatgtaaatttggttaaagatgagattaaaactgtttctttttttttcagttgcatgagacacatttcaaatgcccaacagccacctgtacctaatggctaccatgttggagagcacagatatagaacttttccatcaccacagaaagttctgctcatcagtgctattctatagaaactccaaggctgggtgcagtgtctcatgcttgtaatgagccactttgagagcatgttgggctgcttgtaatgagcactttgggtggccgagctgggaggatcacttgcttccaggagttcaagaccagcccgggcaacgtagtgagacctagtctctacaaaaaatcaaaaatcagccaggtgtgatggtgtgtgcctgtagtcctcaggaggctgaggtgggaggatcacttgtggctgggaggttgaggctatagtgagccaagatcacaccactgcaccccagcctgggtaacagagtgaaaccctgtctcaaaaaaaaagaaggaactccaaatatgcttctctttttctcttcattggctgttatccccattctgcaaaaaacaaacctccaaaaatccctttactaacatcagaaatggaattttaactttttcttctgttttgtttgctcacaacagcaaccctcctccacttcttcccatcaagttaggggaaggacagagacattttggtgcaaaagagatgaaaagtttattcatatttttccattgcccatgtcatgaaattcatcctaaaagcagtacgggtttgagaaagtaaaagttccccagaggtaaaggaacacgtggacagggatgtgttgtgggccacaagaatctcacagtcccagatagagggttcaggtggccgtggggcactccagccaggggcctgctattgagggtaaggccaggatgggactgagagtggacaagacaaagacaagccttgggtttccagaacagcacacgtctcaagtataagctgtggagctggctgctgaagctgttgctttttcattctagaggggagatgtggaatcactgctactcagagttgcgtaggcagatgccttttccaaagcctaactctgctttggaagcctagcttgtcagaagcctaactctaaccctctcttacagatccggctgaatagcagggggctgatctactccgtaggcttgctcctggcctctgtttttgtcacggtaggttggcagctctctcctcgtacttgtgtttgcctgttctttcctccccttggtttctttggagaccagatgagcttggtctcctggtgactgggtacaagcaacctccttgtcccatctcctggctctttcttctagaagtgagtcctagcaacccactagaacaccttctccctttctgaaagaagccagccttcctctcaaaggcatggccctatcttacatagaaagcaaaccattttcccaaacacaaagagaagatcccactttgtctgcaatatgagtcatggaaaggtagattccaattcattgattgttccaggttcccatacgaatccatgaatttgactaatacttggaaactaaaaatatattttattgacagtacattttgaggccattccactctctcagccattacgcccacttgcgtactttaatattcccaactcaactgttgtgtttggaacaagttcacaccaacgcatggactcatccacatgaagcatccattaacatacaaatatgctgttggcattaagcagcattgagacacaatatgttttttccttaattattcaaggaaatagtcattgagttacacctggcatgttgttagcataaatatgccagagaatgggaattcagaaggacaggcaggaagcaaaataagtagtttacaggatcagggtgtgaattgaatgtcaagatttcaccaaagctaatactgccttatacaaaagtgcaaatcgacatcattcatgctcttatggtttaggaggtcctgcagttctgctatgacttggagtggtgatatttgtaatagccacacgccgtacttaatgttttgtatacatatcttcccatttggagctcatcatgccccccatgaggttcactaagatcaacctattatacaaatgagcgactgaggcctagaggagctaattgactcctttttattgacaccaagtgaatggaggaacaagcatctgacaccagggtgcacaatcatagctacggtgcatctttttaggctatgctatagttataccatctacaggagacctggctaaccactaactgggctgtcaaaatgaggttaccaaaatgctgaagagaggcaggtttgggggaggaaaagcaattttaaacatcttaagtttgcaatgcctgtttgacatccaaaggaagaggtcaagaaagccattggaaatataagtctgagttcacgagaaatgttcagtctagagacaccatagtgtagatggtatttaaagccctgcagttgggagagatctccaagggaatgagtgtacacaaaagagagaagagccccaagatctcagtgttgaggcagtctgatgcttacaggtcaggatgataaggaagaaacaccaaaagaaacagagaaggaacagtttggagatgcgggaataaaaccacgagagtgcagggtcctggaagccacctgctggagggttttccaggtggagggagctattggctgagtcagggagaggagccctgagcattggccatgggagttagcaatgcaaaaccattggtgctaatgagagggtagtgctgtggagtcaagtggaataagttaatagagaatgaaaggagagagattggagaccgtgggcagacattcacaactctttcatgttatctgactgtaaagaaaggagaaaaacggaaattcaggaaaaaaagtgttattttaagatgaataagataacagaatctttgtatgccaattagaataatccagggatggagttggggcatgtgctagaggagagggagttgctggaaccaggtccttaagaagggtgggagatgggatctggggcatgcagggtggagttgacctcactgccaggagagaaggcagggaggtggggttgggagctctgtgccgtggggataagtgaggacggggaagtgagtgtcggagattggaagaaaggggagaggtgtgaagtagccgtctggggaagggagagacaagggactagggaaggatgagatgcctgctgaaaagcatgaatgacccacttaatgtcagtggtctctaatttaaaataagacccatccgcatggctgaccgatttcctccaaccctgatggacagctgcgtggatgcagcatgaaccagattgggacttggcttgaactgaagggctatggcttagccaagcaaggacaaccaagcaagagagaggccagggaatcagggtggatgccccggagtgactccagcgagtgtgggtggaattgaatcagaggaaggagagaaggaaacgggcaaagtgggtgaagcctagagaagtggtgatggtatcaatgaggtgtgggctatgggcatttgcagagttgtgggagctggggaatcaggcggagtaagctagaaaggaagagatttgagtcagaaagtgggatgagtgacactaagataagacagatgcttctgtcactgccaatagcaacatctaggccccagtgccacccagcagacctttctgcagtgaaatggcctacacctgggctggacagtaccactggctatggttggctgtagcacttgaaatgtggagctgtgttttaattttatttcatttaaatttgggtagcacataggctggtgggtgtgagtggctgaggccagatgaaggatgaggacttgatggggcagggtgttggaaagaccctctcccctctggaggcattgaaatcacagagaaagtcagcaggagtgcagtggagagtggcaagagccgggcggaaagcttcaaggataggcagtggccggggttacatcgttggctgcaacaggcagaaccaagaggaactgtgggaagaaccgagattccaggctcagtgtttttagggaggagagaaggaaaatggtctggaagcagccatgatttgctgtggggagggaggaacttctcacctccagacgcagccgtaggaagagatgcagccgccaccgcctgaggactgaggggtcagtgtccccaggggagtgggggcctgcttaaagcaagatggggaaggcccagaacagatgaagggcccacaggggtgtggagttggagcttcgtgaaagagggttggctgctgggatgtgcttgtgagtcctgccatttgttttagttatttttctacaaccagcagcttctggcttcctttcttcctgatgttgatgttctcacctcccacaatctgagacgagaggtggattttgcaggctcagagaggatcagcaccctgcccgaggcccatagtcagcagcccttccccgggtcccctgggttcccctaccaaccccccaaaggctgctgcctcctcctggtgccctctgaacctgttctgtgccctgcaggtgttcggcgtccacctgaacaagtggcagctggacaagaagctgggctgtgggtgcctcctcctgtatggtgtgttcctgtgcttctccatcatgactgagttcaacgtgttcacctttgtgaacctgcccatgtgcggggaccactgagccgccgggtgcccacagaggctcagctccttcttttctgtgcaatacgagacccggccgcaccccgagtcacacaggcccccggggccacggcgttcgtctctcctgtgctgtcctcaggcctccgctcctgttttggtggcccaggctctcccctgacccatcctcgctcccccacctccttgggtcatgcccacccaccctttcctgcctcctccgtgtgaagacatccaacatccacgtgacttttccagctccatttttgaacagtgactgagattctagaaaaactggctgctaactggcctgagccaggcaacactgattccaatccctcctccttttttaagttatttgatggaagactcacctaatttgtgacctgagactgttgaagaaatagagaggagggggcccgttgattacagagagcatttgggattttgtttggtttggagatgatgcctaggttactgggtttggggggattgttttcttttgggggccttccccttttactccttttcttccagagatcaagagcttctcttgcatcttcttccactgggctctggattaatcaattacccaaaggctgcacctgccgtgttgtctgggcttgcatcccagatgtgttggagtatgcatggatgtagtgctttttagaggagccactgggcaaggccaccaagaacaaatgcatgacattttatagccaaggacgcctcgctaaagtcttatgggcgtcccctggggttgggggggcacaaggttttggaggaagaagacaacttccctcattccatcatcaccatctctttctcactaggttctttctagttttcaagcaatagttctagcctgccttggacaagggggccccagttaaacaaactacccatccatgagctgccaggcagtcaaaaacagaagcttccccgacttgtgagtccctgagatgtgctcttgttgtttggcatttggggtgacagggagtgacccagaggccaccactgcttttcatgcaggagttacagacactggtttcttggaaaatggagagaagcgcactttgcacagacgtcgtcaattaagtcccaatttgccacttggtattgagtacactggaccctgaccactggctcttgggcaaacgtccttcctcacggggcgcctccgccaagccggcccagctgcacccctcccttcctggagggatggccagggaaggagaaaacagagaactgacacctttgaaaccacagaatgtgttacatgcagactcgctcaagggcataagttattgtgaacgtttttgccaatcactgctcaacagccctgctagattttgtatgatgctgaattattatgcagactaattccacccagttgagacacaccatgcttgttcacttgtatttattgaaactgtggattcttgcccgtgctgtcccttgtatttactttaagcactgatcacttatcattcattcggtatggttttccctgtcccttgtacacattctggtatgaatttgtaaaaataacctgctacaaattggttgaatgtttctgtctgtggtgcgaaccagcattaacggatggggcacgtgcccaactgaggaacaggagaagaaatcaccaatttgggctctcagagctaagacacacttattgattctgttgcacattttgcactggtttatggcgattgttttcttggacggatagtgtaaaataaacttctctgttctctatccttcccagagcagagtgcattactttctcccctggaaagctgtgcatttttcattgaggagaatgtatgggaggtaaaatgattgtagtcactatgtggccaggcatttgccacctgctgtttctgcgttgcctcacctggaaagctggcgtacgtgtggcagattacgagaatgaagtggccagctgtgggtcccctctaaatcttgaagggactttaggcctatcatcctgtcacagaattccagaactctacccgtcctagaatacattagttaagaattcattctttccattgaacatgagagaaggagcatcacagtactgatgatgacattctggagtggccaagttctccattctgtctgattttagtagttcttaatcgtgaaaattaagatttccccaaagctgattccttaaaagtgacaataacatagttgtaataagccatgatctgattctaggtgatgctcaagaaataactacccacatctaaattagtaaacacagagagctaggcttccaccagaaatgcagcataattcatttataagaggcagaagaaaaatagccactaatccacagcaccaactttatttaactgttgaaaaatatatattcccaaggtgggaggaatactagatacttagcatgttttgagtgtttccatcttcaaatgttttattactatatttgtatattttacaaatataccctggacacagggcagggtattttcattgtgctgatcagtgcctacaaagcattagatactttcatgttaagtatcttgttaaactagtcttaattagttttacttttaatattaagcaaagacatttagtcagaagcttgatttaaaaaaatacattttctatgaaatctttagaaactatagttcatggctgaatttctcaaagtgagaattatgggacagcgtagagttttcatgcttccatgcataatgattgccaacccaggaactgtgggggtttcctttctgaaatgagaatttagcctatttctgcctagaactcaggcatgcacaactgtcttgggtcgtgagttgagaatggggtttgaaatgagccggctgttcagtgatgccggattgctgatattgctcttttcacgacttctgctgagctgggacttaagatggggctgggataagtttgaggaaagaacctttgtcaatatccccaaacctgacgatgtctcctagagaaaccctcacggcagttttctgagcaggctgaactccccaggccgcagcctcgtgcacaagtgggacgtctttctggccttggccaagggaagatgggcactggggctcacacttgctcctgagtgtgtcctagtggcccccaacagctggcacctggagaagaccctctgttcccagagattctgtttctaccttgctgagagtcactgccaggaggagtcattgaggccctcaagtggcctcagatacactgagaggtcactatgaggggatatttccaggcacaatggaaagatagcgtctgccccttctacagaaaactgctggctctacctttttagtaatagttcacttttgtaggcatatgttttgtattcacctccaaaagatacctggcatagagggtaagtggatagaagccattttattttcctaggtcttttgctacagacacttatagtttacagtcctagatttgcatactagggatccgagactctgtataactcaagcagcaaatttgagctcattttaagcattccagcttcaaagaaaagcctgaatgtttagaaaaaggtaaggagtgataacattgtaaaatccagaccgttttacgttgtggtgtataaaaataaatgtaaccaaatagtgtcctagaattttacctaattgttcttaaaaatattcagattgtcgagaccacggtgaaaccccgtcttcactaaaaatacaagaaactagccgggcgcagtggcgggcgcctgtagtcccagctactcgggaggctgaggcaggagaagggcgtgaacctgggaggcggagcttgcagtgagccgagatcgcaccactgcactccagcctgggcgacagagcgagactccatctcaaaaaaaaaattcagatcgttgggaaaaattagaagtgagaagttggtgatgacgatgatgctttttccgagatttatttattttcacttttttaaagtagaataattatcccattaacagaataattatccagttacgctgacccatttccatcaactattttgaaatagatgagatattttcatattggattttgtaaagtctcatactaattaatgagtctcatttattttgttattttctgcaatggctgcccatactcacacacgtgtgtgcacacacatacacacacacacaccatctatgtgataccaaaactctgtatgaagacaagccagtggattattgaaattttttcaaaaaagttcttccaactctctattattatgcaagaataacagaggcggattccgcaaacttttctctgataaataaaaagctatatgttcattgtctcgtcatccagagatgtgggccctgctgagatgctgaaaagtgaggagctggggctgtggagagcagagaagattagcaatgtacatgagatagataatgccaggccccagaattgatctcacattgaactttatgcttacaacacagggcagagtaacaaaactccaccaaagttgttcagatggcttactgttacactcaggccatttatttctttaataacatgtacccagtagtcccattaatttaagaaattcttactaaaccttaatgtagcaaacattcttgccacgttacagagatttaaacatagtgagtagccacagttaatactcatgttggtcttggtcttcgtttttgcaataagaaggaggggaggtaagatttaaaactacaattttggctttcacagatgccacatgaggatttttctacttgaatgaatttacataaacatatgcatgtatacataaattatgtttcttcttcatataacttcccacttaccctatttatcaaaagctgaatttggtgatgtcacatcttctggtttgttgggacaatcaatccagtaactgattccagaaaactacacacaaaacttggaatgaaatgtgatgaggaatttcagaatccctgcaattgcttttttcagtgcttctgagccatgcttataaatcattgcttaaaagagatatgcttgtgtgtgaaggtgcttccagtacaaaactaatgttttttaattcttgcaaaataaagtgtactccactcagttttacatctttatttttgatgtgccaagtcagacatttcacttcctcccatgattaatgaaggatgattcattttttaaaatactacatactaaatctgtactgtgtttggtcatcatggctctaaccaccaatgagtctgaacccaaatgcccagtgctgttttcttaggagaatggattttgtctgctggttacagatttctgatataccagttccagcttttctaaaaatgtattgtcataacatgtagaacagttttttacaattgcttaaatattcaatccaacttcacatgtgaaaaacatgtttacctgcatttattcatcatattatttaatcagtgtttcccaaactgatgcatacgtcagaattatctagagacttctgggcctcaccccagagtttctaactcagtagacccaaggataagtccaagaattttcatttctcaccaatgcccacacattaccactgttgggtctagaactgactttgagaaccactggtccaaataatgtcctttgcccataaaccacatttttcttacaccagccccaccagtatcataggtttacaacttatgaaaagcatacatgcatacatgcacacagatactatttcttccatttttcagaattattttttccttctacttcctgagagctatgaatagctgaaagtgggaaaagagtatgtctaattcttcataatctccattttctaccattctgcagtctgtctgttcccatcccaaaagaacttttaaattaaaactaaatcagatgaaagtaaatgatttaagataaagatgcaggaaagccaaaattctgtgtgggatattcactctgcagagatggaagcaggtgactaccaatttcatttaaggtaaaaaggatttcattataaactacaagaaaaagtaatgttgcatataggagaaattttctgcacatgaattcatatttgcatattacaaccatgtgtagctaaccttctcatctaaatgtgttattttgatgcaaatcaatccagcaaatatgtcatggcttagaaaataaataataggcctgcacaagagtgagccaccaagtgcttcagatcatcacatgaaatgagagcggcacacaccccgccacgcgtctcttgcccgggactcagaaacctccatggacaggctgtgaccaagggtcagctcccaagtggaaaatgattgagactcccaggtgagagacagaggcaggcaagacttgtgtctatggccagaccttaactcgggcatgggctcttgcattgtctgcaagaactcagaggacacactgggctcaaaatgacctggtaaaagccacatttttatagagttcactaaaagttttgctctgagtcaggaagtgggtataaatattggcaagcggaatccagggtgggctaggcaatgaggaagggtgaagtgttcctctctagaaatagaacatttcacgcttggcctgagccagcaaaggggtaatcagcccaaaggcaaagaggtgtgcgaattcaccctcaaatttctggatgctccgaaaaaccagtgtggctctcttcccagtggtggtatcaccaatcaagaaacatgggccagcagtaggagatcctgcctgtaatctcagcactttgggaagccaaggtgggaggattgcttgagcccaggaatttaagaccagcctgggcaacatagcaagaccccatctctacaaaattttaaaaattagcaaggtgtggtggtatgcacctgtagtctcagctactctggaggctgacacagaaggatcacttgagccaaggagctcagggctacagtgagctatgatggcaccactgcactccaacctgagcaacagagcaagaccctgtctccaaaacaaaaaaaaagaagaaagactttgagaaccgctgttcaaaataatgtcctttgcccataaacccacatttttcttataccagcgcctacccacatcactcttctgtggtagcattgttagtgtgagaccgctttgccactgtatgatggaatgcaagatatttcttcctatttctaagcccctctgtgggccaagtgcagtggctcaagcctgtaatcccagcattttgggaggccacggcaggctgatcacttgagttcaggaattccagatcagcctgggcaacatggcgagagccccgtctcttcaaaaaaaagataaaaaattagccaggcatggtggcttgcacctgtagtcccagctacttgggaggctgaggtgggaggatcactcgagcccaggaggcagaaattgcagtgagccgagatcacactactgcactccagtctgggtgacaaaagggagaccttgtctcaaaaaataaataaataaataaaaccctctgtgatggaggcagcctccttacacttctaggcagaatctaatctgtcacctaaatgttaactgttggcacttcttaggaggaaaccaagaagtttgaaaaaacagaagagatccatgccaagaaattcactcatctgttataaatgaggcaagtctgtcatacataaggcagatcaattattcggaggtgttggtacttactgtgccttggatgcgcatgctaacagagtcactcatgttgctctcaaagggaatctaatacaattccaaattttcaactttattatttgtttcattaggaattatgtccctgatatgttttggctgtgtccccacccaaatctcatcttgacttgtagctccagtaaatcccaagtgttgtgggaggaacccggtgggagataattgaatcatgggggtggtttcccccatactgttctcatggaattattaagtctcacgagatctgatggttttataaggggaaacccctttcgcttgactctgattctctctttacttgccgccgtgttaagacatgcgtttcaccttctgccatgattgtgaggcctccccagccatgtggaactgtgagtccattatacctcttttcctttataaattacccagtctcaggtatgtctttatcagcagtgtaaaaatggactaatacagtccttttaacattttaacatgggttgactggctgcacagaaagtttcacaatttttttttttttgagatggagttttgctcttgttgctcaggctggggtgcaatggttcgatctcggctgatggcaacctctgcctcccgggttcaagcgattctcctgccttagcctcctgagtagctgggactacaggcatgcaccaccacacccggctaattttgtatttctagtagtgacagggtttctccatgttggtcaggctggtctttaactcgggacctcaggtcatccgcccgcctcagcctcccaaagtgctgggattacaggcgtgagccactgtgcctggccgaaagtttcacaatttatatgtatgaattctgggaccagacagcctttgaatgtcagtggcaagctcttccctggccctcatcaggggaaccatgctggcttcgctgtatcttctgagagtttcctctgtgactcagtggtgtgggaagccaggaggtcccaaatcctgcttgcttgctcatttctcacttgcttcacctccgtcaccatcctgagagttcccacgtggccccttttcacaggtctcaggcagtctgatgtgacttctctcacttttgctggcctggcagtggccagatgtaggatcctcaagggttctcatcatcagctgagctgtgaagccgactcccaccatcaagagaccccaaaatggggagagctggggtcatggcttacccaggttctgtgatgcatgaaatgaaaacagggaatatttctaacccaactttcaaactctggataaagacgcggtggccatgatatgatcctgcttctcgtgaaagccgtaatcagggggccagcaggctctgggttcaagggcaggagttctggcccatcctctcgtcctcctggaagaattcattggggcacatggtcaccgaggtccctaccagctcggacaatgtattaacttagaagagagaagatgatttccctccagaaatcaaaaataataattatatatgttatgtaaatacagcaagactggcatgagttttgatataaaatacttcacaagttattctggtcatttgctctgtaactgaaattctgtctgactacaggtgcaagccaccaggcccggctaatttttgtatttttttttgcctggctaatttttgtatttttttttgtattttttattgtagttggggttttgtaatgtctataattttggacatcatctgtaagatgatgtaaacatgtttgtaaagtcccatccccttgtccttctcaggaggcattgttgggttccagagacccgacatgcatttattttaaaggagatgtagggtgggtgcttgttgcctggcaatggctacgtgtatcctttccaacatcatacagggtgtgagttctggccctctggaaaaaaaaaaatctccaagaactggtcatcttggggacaggaagctttccaagaggcagaaatggctggagttgggctggcactgggcatcagaacgttccagcagaactggtggtgtggacaggaagccaggcatcctcaatgagcgccacaagccatgctgacacacgtgcaaggtcaagaacctctcggttcacttcctttgcacatgtaagtcactttagggacagacaaaaagtatttcgaatgtgtataatacatagagcagagaaaatgctgctgtccctgttggtcacaggtcacctgttttcctacagcgctctgtgtgtcttatgctcaccagaagctgagttatttttttctttgcttacacttaaaatttactatttcatgtagtacaatgacaaaatgagggacaataacaaggcaaaatatgcttaatgttataaatatttgttaataacagttgcagggcttgagatttggaaaatagctacctatccaccatgctttctatttagacaatgtcagccatgggggagaaaaaagcaacagtgttttcttgaatgcttactaaatgtgaggaattttcccccagtgaaaatcagagtcacaaatggtaaaatctgcacaatacattagtaaagtatcatgctagcagcctcgcagaagacctcagtgcatttttttcaatgtaaactatgaaccatgcctgagacggcctggcctgaccagggataaacagcagtgatgtctgcaactggaaaacctggccacacatatcaggcatggaagtcacccttgaccaggggtcctttgacatgtcttaggttttgtttttactttatttctatttttttattttttttatttttatgggcacatagtagaggtatatatttataaggtacctgagatatctgatacaggcctacaatgtgtgataatctcatgagggtaaatggagtatctaccacctcatgcatttacactttgtgttacaaataattcagttatactcttagttacttaaaatgtacaattaaattattattgattatagtcaccctgttatactagcaattactaggtctttttcattctttctatttttttgtgcccaataatcatccccacttcccttcccaacctccacactacccttcccagcctctggtaacaaacagtccttctactctccatctccatgagttcaatcgttttaatttttggcacaattaagtgagaatatgtaaagttagtctttgtgtgcctggtatatttcacttaacataatgacctccagcttcatccatgttgttgcaaatgacaagatctcattcttttttgcggctgaacagtactccatgatgtatatgtaccacattttcttttcttttctttctttttttgagatggagtcccactctgtcacccaggctggagtgcagtggcgcgatctcggctcactgcaacctctgccttccaggttcaagcaattctctgcctcagcctcccaagtagctgggattacaggcacccaccaccactcctggctaatttttgtatttttagtagaggcagggtttcaccattttggccaggctggtcttgaattcctgacctcgtgatccaccaccttggcttcccaaagtgctgggattataggcatgagccaccgcacccggcctatgtaccacattttctttttccattcatcggatgttggacacttaggttgcttccgaatcctggctgttgtgaacagaactgcaacaaacatgggagtgcagataatgtccatatcctgatttcctttttttttttttggtattgacctagcagtaggatagctggtagctttatttttagtttttgaggaacctccaaactgttctccatagcggttgtattaacactaatttacattcccatcaacagtgtatgaaggttctcttttctccacatcatcaccagcatttgttatcgcctgtcttttgcataaaagccattttaaatggagttgagatgacatctcgttgttttgatttgcattccctgatggtcagcgatgttgagcagtttttcatatgcctgtttataggcctgatttttaaattgataagtgtgggttatacacaggcacaatgtcaaataggcctggtcctcagtatatttttcaacccagcaaaaggaatctctgtggccaactgccaagaaaagactatgagtgattactaacaaaatagaagacacttcggaagcatgcaggtgtacatggacctatgacagctcagatactcacagtgacatggatccaacatctggaccatgtcattattgcagaccaaatgccagttcagctgaaaggcctacactatctttgctgtaattgatgttgcttctaaacaggtctttctatcctccctgtccatttttctgaatgcagttacatgagcataaggcagaaaccaggaaactctgcttttaaatctttataaaatgtacttttttccttttttttttttttttcagacggagtctctcactttcttgctcaggctggagtgcagtggcacagtctcggctcactgcaacctctgcctcccaggttcaagcgacactcctgacctcatgatccacccacctccacctcccaaagtgctgggattacaggcgtgagccaccacgcccaacaaaaatgtattttcttaatgtatgcatctagcatagagagttcaaaatctcaggagcaacccttaatgtgtcccttatatccacaggtactcttcacatggagagtcaaatccaaccaaagatgaaattcctcacctgtaactatttgcatgattttcacgggcctgcctggcccaggcactattcttttcccagtgactggaacattaatgggaacactgatgggtgtaagaaatgtgttaacataaaaatgttttattttcccttcttgactttcataaataaggcaggtttcaatacggggacacttgaagcaaagaaagatcaaaatgaatctcagtgttccttcaacggcggccaaacatctcttcttgtgtgagaatgtcacagtgaagatgtctcagtttcttagtctctattagaaatttaaaattattattatttttaaaggcttcagtccaatttctcagagacttcacctgaaaatggaggcactgaaaaagccatgaggagctgaaaacaagcagagtattttgagaagcccagaaaatgtttcctagcccttctcacaccgtgcgtcagtgcagggcacggcactaaattcaggtggaagcagtgattcctcaccttgggtccacattagaaccacctaggatgcatttaagaatcccaaggcccagccgccaacccccaccccatcccgatttgggttctctggtgtctgacacaccccaggacctcagattttgtttgggactcccaggtatttctgacatgtatccatggttcagaaccactggtttaaggaagcataatcataccatttgcgatctttcattgtgcagattcctaaaggaaagccctgtgtcctgcaggcctttgctacccagtgtgagtgggccttaacccggcagctttgatgagagagagagagagagagaaatgatttttggagttcctggaggacagcactgtccagcaggacttcccatgatgatggaaatgttctttacctctgctgctcagtacagtagccaccagaggcctgttgccgttgagcacttgcagtgtggctcatgcaactgaggaacaaaatgtttaaccttgtttatctttaatttaaatctgcatttaaagaaccatatgtgattaggggctccaatattgagcagagcagacagagcgtactgaggggccgacttggccaacaaaggccctagagtttcttccatggtgtagagagaacattgcttctgcctttggcaaaggtcatgaggccgtctgccctgaaacagacgggatgcttcagagcaacggttctcaaaggatagtcccagagccagcagcatgagcaacagcatcactggggaacttgttagaaatgcagactctcaggccccatccagacctcctgaactagagcctgcattttaacaagatccccaggtgatttctgtgaatagtcaagtgtgagatgagctgccagtagctctctgctctgctcttcagaagacaagaagcaggttgcacagaagccttgtccaggaggtcactctatattaagtcaagggtatccgtgtgtattacaagacttgccaaatgtggacagacaagagttatggagagcaacacatttgaaactggggatagattggtacagtttaaagggcaaaagggtcatcttttagttccaataagcctttgttttgatggggcagaggagaaactagagagctcaattaaaagataaagatttaactcaaggtgtttcctacttgattttcaaattcattccagttgtttctttagaaggggactcacatcagatatcttgctagtatagaaagttcctaagctgtactgacaaacaaaacaggcctgtagccctgcgacactgtgctttacttgcaagataaggggctaagggaatgggggacaaaaaacaaaaaaaaacctcaaccaagaaactcaacacatttaaaaaagggggcagaaaataggacaaggaaaaaagtggtttatgtaacagcaattttttgtaataagtgtggggacgggtcccatcgggacgacattaggctgttaattttgaaataatcattggaacccagctggatagcagcaagatttgacgccaggagcaaacacagccaggaagtggaggagcagatgactcagcccacagggcaccagaggcggggataatttctttgcccaggggagtagcagtagtcatctgttgtgtaggcattaccaagttcaattgtgtgagcgagaatggaaatctgttcttctgcagcttgtgaaagaaattaatcacagctctctgcatgacaaattttggattttagttcacacagtccctgaattttccttcaggttaaattttcctttccttgggacctcgtgttgcctttactacagcccaactctctcttgcccattttgcaccccaatccaaatataaaacaaaacaactgggaattggttctaaatgcccctttcacatctgctcaggccatcattacagaatttcatttgcaaaaaaaaatccagatgaaaccaaatgaggcattttattctggcatttcattttattctacatacagataacgacagggcagtgaggagttttggtctgtggcctcttcccaggactaacaagagcctgacacaagaaaacacacccttggtgcttttattaataacttttttttttttttttgagatggagtcttgctctgtcgccaggctggagtgcagtggctcgatctcggctcactgcaagctctgcctcctgggttcaagcgattctcctgcctcagcctcctgagtaactgggactacaggcacgcgccaccatgctcggctaatttttgtatttttagtagagacagggtttcaccatgttggccaggatggtctcgaactcttgacctctagtgatctgcccacctcagcctcccaaagttctggaattataggagtgagccaccgtgctcggccttaataaccttttatatgttgggtacggtttttcacctttgtaatcccagtgctttggaaggtcaaagccagaggattatttgaggccaggctttggagaccagcctgggcaacatagcaagaccctatctctacagaaaatttaaaaattagccagccatggtggcatgcacctgtagtgtagttctggctacttgggaggctcaggcagaaggatcacttatgctcaggagttcgaggttgcagtgagctatgatcgtaccactgcattccagcctgggtgacagtgtgagaccctatctctaaaaaaagaaactagcaagaaataaaaaatagcataacctcttatagtccaccaccaaaacaaggatacagataaaaagtccaaaattgtgtgaaagcacaatgctcaaaaatctttccaagactactctcatggaaaactaaaatgagtgtaggtttagatttattagcttattaacacattaatcagtaagatggtaaatgtagctcaaaaagcatgttgaggacatcaggatgtataggtatatacaaagactgtgaagagtgctagatttgagactaatgaatgagctccaatgcaaccacactcataacctctcgcagtcttcattacctgattcaaatgatttgcctttcccagacaagatacacatgttgaagtgtaacttcataaagtgtgagtcctccatcaacagtaaagagtgagtcagaggtgcactcccttagttcacacaacaatccttgggtgcgtctgttgagcaatgtttcagtatgccactgaaaggagaaactaaccttaaccctaaccttaaccctctcttgtctttatttccaagtgttgggtaattgtgtgaaactcgtgctggtttcaattgaaatcattcgtcatacatgcatgttcacaagtgcttcagctaagcaggcctgaaatgcctttagtttcctggaaatttcgttaaaagcctttgtccttcctaaaatgtccccttttgaaatcctatacttcaaagtatcagccttatactgtatacttatgtacagggtaagatattaattcaaagaaacaatgcaggcagctaaattcctttcatctaaacatgcctttcttctttctccttggtgctacatttcactcaaagctgcaggaaagtatacaggaaaaatgagctgagtgtgttctgcaaataggtcaggctgaagcaggaatgttttcctgtgctgaattaaaagttttctgtttcatttatcagtagaattaaaagttctctgatgtttctctaagtgtcatacatatacaaaacagtgtaaaattgaaaaaaaaaaacccacatgctgtattgtccatttctgttctttgggactctacagtttaaaaaagaaagaaattaaagaattttgaaaataaaagttatcttcaaatattatctctcttcttaatgaaattttttacctttaaagcagatgcagcaaagacaaactttggttattctttttaaagagatataaactgatttgtttcatgcttatatgaacctgatttctctatatttgttttgccacttattatagaggagtatttgcctttatgactctttttcttcttgcatgcactaattagtagtttaagagaggtgaaagcacttacttttccatttttcagtaatctgagtatttttaaaccagtgtttgtgtattttaaaaagtggctatttgtgagcctaagaaaatttcacaacactgttgctgaaagaataataatatgtatcacattttagtgtttaattatcttttaatttactttgataactattctgggttgaattgtcccccctccaaaaaaaatttatgttaaagtcccatccctcagaacctgtgaatgtgaccttctttggaaatagggactttgcaaatatgatcaagttaagatgaggtcataggggattggggtaagcgctaatccaatgactggtgccccttcaagaagagggaaacatgggccgggcacggtggctcacgcctgtaatcccagcattttgagaggctggggcgggtggatcagctgaggtcagaagttcaagaccagcctggccaacatggtgaaaccccgtctctactaaaaatgcaaaaattagccaggcctggtggcgtatgcctgtaatcccagctactcgaggggctgaggcaggaggagtgcttgaacctgggaggcagaggttgcactgagttaagatcgcaccattgcactccagcctgggcaacaagagcaaaactccgtctcaaaataaataaataaataaatagaagtaaataataaaaagaagagggaaatgtggccacagacacagagagagaacgccaggtgacctcggaggccgagagtggagtgatgctgccacaagccgaggaatgccaaggactgccagccatcgccggaagctaggagagaatggaacaggtcctccccgtgagccccaagaagaaaacaacccggactgattacggacttctggcctccagagctgtaagtgaaaatggctctgttgttttaagccatcagatttgtggtaatttgtgacagcagccctgggaaatgagcacagtggtgattcagatcctaacctgaaaccatcccaagttgatggatgcaccaagtctttgtaatttgagctgaactacttacaagaaagagttatgactatcgataaaggtgagaatattttacaatcctgtttaagccctctgtgtctatttccagggtggggccatgctataaacaggacaaacagaactctctgcttttgctaccactgaaaaagcatttccgtgggagatccatattaggtagcacctggagatgccaggaccacaaaaccactgcccagcgttacacacacatacgccctccaacccccaggatgggatcagatccctctgtgattctgccaaaggctgaggctggccacgggtttgggggatggggctgagaccaggcggcagggatgccgtctagtggggatgggaagcacaagagagatgaaagcttctgcagcttctgctgccatgcgctcttacataggatagccaagggcacaggccagaggcagataggggagcgggctctctctaggaaacatcagctccaaggaggaccgggatcctttggaaggagctggagctggggtgagacaggggcagacaccctccggatggatgggacgatcatggttccagcctttggacatctggaaggtgagtagggacacaaagcatgtgggaactggggcagacagtggcccatttcccactctgctgtgtgggcatcaaatgttcccccaagggagtttctagcttgagcaagccattgttctcagcattcatttgcccagtgagccatggttttggagaccagagtatgattctccaaaacacaagtgtgttggacctacccacataggagacccatggagaatactaagtatcagtcaattccatttctcccatcgcggccccagtccacaccctaggaggcatcctactggtggttatcattatttattcactctgcagagatgcccttttttcctctggcctttcctcattggtccatgtaggtttctttggccacccagagggtgtggcaatcctatggtgctgtcttaggcctgtgtgcctcaatacccctcatccatagttcttctgaccccaaaccatgctaagtgaaagagagctccacagtcttcccacatcgctgggccccagcctggaaaggagacacagatgccctgctagtcttagctcctcattctctgtagggaatctataattcctcctgatcacaatcaggacttactagggtaaatggcactcgagcctttcctccagagggcttaaacttaacacaatgtctggtcaaaaccatcctatattgattttttattacttcacacttgaataagtaacatcatctttaagtttaggttgcaactcaagtgccaactacaaattgcactgaaatggaagaactcaaatgcatgcctggaccagcatcaggtgccttccggaagtactggacatgtagagtttaggtagtaagctgcctgtagagtttctactctgcataaacataagcacaggactaatcaaaattgcccagaagatattggaatattcttttctattcaattaaaaagtgatgtcatagtttgcttaagggcaaagcgcatggaagtccccctgatgtcacttcttcaggtcaccactgacagccaaagtttccccaggaggtcattcaaggatctccgagtccttcagtcttctgggatcatcctttcctttaatatccaaataaaatatctgaagaagtagagctcaaaatggtagactaatcacatgcatttgcctccctaccctccccaaatcccttagaatgaaagtaaagaggtgcaagaggaattaaatccataataatgggatctgtgtgaggctcatcaagaaatgtgaaactatggtaaattaaatgaaaacacaagcagatatgaggatactgatggataaaacaaagcaatgaatgaaagatcaagtccagacagattcttgtgaattttacaacttggggggatttaaaagaaaaagtctccagaggaaaagaaaatcagatcagctataaggagaaggagattcagactaacattgattagacttcatccacaccagtcagtaaagcacagtggagaaatgccttcaaattaagagggaaaaatattttgaactaaaatgtcattgttagccaaaatatccactgaacatgaataatatatattctcagatatacacaacctctgaaagccttttctgcaacaaaatgagagagaaaacaaaataaaagaggaagacttgagattctagaaaacaacagatttacccccagaagtatggagggaaaaaaatgccttggggttatagctcccagcaggtatagacaacagccaatttagattggagcagaaatgcaggattctctggaaacatgtcttcagagagaaagtaaatcccttagttggtgtgattaaatagctggatatttctgaagatgtgtaatgataaatgtcctctgttgacaatataaatataaggagagaaggaaggaaggaaggaaagaagggagggagggtgggagggactttagcagaggtgctatctaagaaaatgatggttaaaacatgaagcaagctgaaatatagcatggttgtgattttgaggaattgagggaaggcaagaaaagagaatttatttgaccttgatgctagaaaagaaggtctagaaaacagaattgggattatagggcagaatgtgcctgttacagtaaatccgtagctgataggataggaagaaagagttctatcaattaaggtagttagaaaacatttgtcctccataaattttctcttctcctgtatcttttaagttatattgtttgttgttcaacagccatgcacaatcccacctccacacatttgaccttgaacttcagcctctttctccagcctagctaagcctaccctcaggctccagctgagggccagcttctctgtgctctctcctttggcaacccagtctacagtgatctcactgctgaaaccaaaaggatgcttcgggactgcttcacaaactcaaactgacatgccagatggagaatctgaataatgtgctcttaatactgcttatgaaaatcaaaacacatgcaaaatttagtatcaaagggaaatttcaactgcttgtttggaaaactttcctgaaagtggggaatctgatctatccttgaattaatattctcgatgatttcaactttcagagcaaaagcaacccggagccttattttctgaccaccattttactaataacatttaaacctgaacacccgcctctttccttagtgagcagagcagaaaaatgagattagtccctgtgagcattttgctacatagatgtcaagccagggtgtgctagcatcacctagagagcttttaaatatcctgacacccaggccacacgccagaccaattgcatcaaaatctctatgcgggaggcccaggcaccagtgtcttttagagtttctggggtgattccagtgatcgagaattgctttaaaggctacagcttctcaaatagtgacacttccagaaccttagatacatattagaaccacctggaagctacaaaatttcttatgcctgggtcccattttagaggctctagctagggtgtgacctcggcatcaggattttaagactccccaggtgactgtaatatatagccagcgttgagcccactgccccacaacagaacagagcactaaagcggacgggctgtgtaccaggagttgaaggaccccacacttaaggagatagtagaagagacatggaaagccatggaggcaaacaatgacatttttgggaacgttaagtttttcacctagagtattagagagctagagaaccagggagtgtattaggagattaattcttgctaactgggtagaggcgtccaggtagggcactgagagaagagtttgaaaggaaccttctaatttctgctcctggtctctttcgcacagaaatcagccacagccaccgagccgcaggtgttaagagagaggctttcagggcagcacacaaccgtctgtgttgaagtaccattgaaacaagggccggcacagcactggtggaactggcttcttcccagtgctccttctacaagtttaaaggtgaaaccccaagtgtggatgtcatctggtggaaaatcaatgaatggcagtgaccaacagttgttctccaggacctgggttctccttgtgaggttcattctctcttctctcctgttaggcgctatgctaagtagtaggcaaaatgtccgatgatctcctgtcccagagttatactccaaagaatcctccctcttcagtgcgggcaggacttgtgacttgcttctagctaacagaatgtggcaacagtgatgaaatgtcactcctgtgattatgcaatggcatgtcataaaataccatcttcccagaatgcctaagagtgagagatgctcttctgctgaccctgaagaagtgcccatggagatagctacagggtaggggactacaggtctcctagggagctgcaagtctgaatatataaagggacaatggccagatcatctgtaaaaatagaactctaaccagcaacctgcagcagctagcccaggaaacccaccgattatctgcaggagccagcccaggaagccagtctgctatttacaagtcaatctcatacaggaagtcagaccaccaaatctaacaactggcccaaggagccaaacaataactcctgttacaatcagtctcacactgccaggacttgatataacagacagcttccctcattttattgctaatttccaattaaggacaaaccagagagaactaaatatgcactttcaaccaaccacatgggacaaccttcttcccttagcccacctacagattcctcatcacaacagcctctatcaaggcacacctgaagccttccctttcttcctggataaggttttccaactcctctgcctgggagtcagaattagcagcatcttggacagtagtaacttcgacaaaagccatttcagtctagtatcggggacagactggagcaggctgaagagcaaatggtagatgaggaagccaagacaaataacatagacaagagtaacacaatctaagaattataggtgatctagaccagcagtgaacatttttgtaaactgccgaatagtatattttagcctttgtgagccagatgattttattttattttactgaaatggagtctcactctgtcacccaggctggagtgcagtggcacaattttggctcactgcaacctccacctcccaggttcaagcggttctcctgcctcagcctcctgagtagctgggactacaagtgcacaccaccacacctggctagttttttgtatttttagtagagataggtttcgccatgttggccaggctggtcttgaactcctggactcaagtgatctgcctgcctcagcctcccaaagtgctgggattacaggcatgagccaccgctcccggccccagatgattttttaaatgtaggtttaattattattaatgtatggtgaagccaacaagccattgaatgagatgattgccattgaaaagatagtttgttacagttcccaagaggaggggcacatcatgcaattgagggaggtcacactgtgaagtatcagggttggtcaggaggccgaagaagtgaagggaaaacgtgggcaggagcctctgtgtgtgtgtgtgtggtttcataggaatgggcaagttaaggtaaacaggcttaggacaagctggtttgagtaatttcagtgggctctggggcacagtgactatccctagttgtctggtgcctggccctggggtgattagggcaggtggatagtggtccaagtctgagagcccaacaaaggaggtggttgggtatgggtttcagatgggttgatttgcattagaaagcagcattcctggacagagttgtttgctatctctaggaattagctaactctgagggggcagtcccttccagtgtccgcagagccccatatgtcaaagcctcagaataaaaaaaagaaaaacatgcttaatacagatgttctctgttgcagctacttaactctgctgttgaagtatgaaagcagccatagacaatatataaatgaatggctatggctgggccccagtaaaattttattgacaaaaacaggtggcaggccaggtttttcatgcaggctgcagttgctgacccgtgtgtagatgaaggaatcattacaattagaacccgtgcagtaatcaaaggcttccctaaagaaaatgttttagagctgaaaaagaaacccttagataaatcaaaaatttaactctgttgtacaccaaatcaatgaagaagtattcatactccaacacatacagggaaatagcttaaagtaggaaaatgaagcaaattcttaaagtatgcaaaattagtgtctataataatgagaaaagacaatcaggctgaacccaaacttgtcactgagattaaacattagaaagtaataaagcagtgtttattgagttttgaagggaaatggtatcagttatctattgctgtgtaacaaactacccctaaacttagtggcttaaaacaacaattacttctttttcatcattatataggttggctgggctcagctggtggttcttctgcatcctgtgttatctgttggagtcactgacatggctgcattcagctagaaactcagctagggttggatcatccaagatggctagagcctcaactagggtaatcagatggcagaaagctgtctaggattctctctccctacttggtatcttatcatgcagcagcctttcccaagattatttacatcgttttggatcctatgatgagaaaaattggggtatccaaagctttaaagtcccaaggcaaaaaagtctcacagcatcatttttgccatattctctcagccaaagcaattcagaaaatgagactagattcaaatagaggggaaataaaccaacctcttcatgagaaaagtgatagatgtccatataccaggatgggaaaaactgtcaggggccatttttgtagataatctaccacagaaaacaaaattccatacacatctgtgtataaagagataagaaaaactttttcagaaacacgtatgcttagaaaacttatgatctttatgttcttcttgaaaaaagtattttgttatgttctttctattctgatgaaaaggtatatcattaagaatggcaaagacaagatatgaaagacgggggagtagatatttaaacaagtttaaataaataattaaatctaagtaattgttataaatagaattgaaatttgtagatacaaaataattcttgaaagacaactcatatagtctaaaaataatgattcactaatccaaatatctgttttaaagtttagagtgtataaacaaatactagagaaagaagagggaggctgggcataggctgtgagtagggaactgggaagcatgataaattccatgttgacacaggcagagccatgtattttttatcctggtagttaaggtaggcagtttttaggtaaattaaagataaccggtactctattttccaccccctaaaactgctcccatctcaataaagggacccacatttcagccaggcactcagcagaaagcctaaatccatgtgtgatctctcttttcctcccctttatgggacttctgcaacgtgccctgaagccttatcctctgaaacatttgcaggaaaggtttagtgtatgtcttagtctgttttgtgttgctataacagaatacctgagattgggtaatttataatgaacagaaatttatttcttacagctctggaggctgagaagtccaaggtcaaggggctgggatctggcaagggccttcttgctgcatcatcacatggcagaaggtggaagggcaaaagagaacaagatggggcaaactcacccttttataaaggcctctatcccgccttgagccctcatggcctaattatctcttaaaggtcccacctttaatactgttgcagtagcaatcaaatgtcaacatgagttttggagaggacaaacattcaaaccataacaaagtgtaaacacatacccacatgcatatatacatgcacggacacattttttttaacaccactatctcattataacttcttattttaaacattctcaaaggaggcaatatattttcagctaatgtaagcaaatatttggtactttaagtcaccctacaagtttaataaatttattgatagctaaattcaactaaagtataatccaaattgtattcaaatgtactacaggagggatatgtaaaatagcttgcccagtgggtcctaccttcaaagcttaccttgaattcacccactccattccatctctaaccctctacctaatcaatctaccatcccttgcctggggactgcaagtctacctctttggtagacttctccttctaccattcattgcccatctcctccctgctatcctttctccctacagccttctttgtggctacttttaaacatacaaagctgattgagctgttccttgctggaaccctccctgaggactctccctaagcctctagctgcagccccagtgggcttcttcatattccttgacacccacctgaaggccttgtctttggctgttccttctgcctagactggaatatttctcaggtactcatctgtctgcatccttgttgtcatctatctcagcttaagcataaccttctcagggaggtcttctctgatagcccaaattaagtcagcccccagccactcttcctcacactattctgtttgttttattcatggtatgcatcatgccctgcctatcttcatatttaattgttcacgtgtttattgtctgccccccgttggatgataagtacattgaaggaaagatttgatctgtttcatcacatatccacagtaccaaggacagtgccttgccaccccttaggtaatcaaaagttctatatttaaaaaagaaatgactccaggctcagtggctcacacctgtaatctcagcactttgggaggccgagatgggtggatcatgaggtcaagagattgagactagcctggccaacatggtgaaaccccgactctattaaaaatacaaaaattagctgggcatggtggtgcgaacctgtactcccagctattcgagaggctgaggcaggaaaatcacttgaacccaggaggcggaggttgcagtgaaccaagatcgcaccactccactccactccactccagtctggtgacagagtgagactctgtcaaaaagaaaaaaaaaaaaaaagaagcactatgtttaaaacaacaaatatactttccaaatgactggagaatatataaggaaatagagcacagtcagttttaccaaaaacacagaacttaggaattggcagggtttcataaaacccagaaagcataaaacaagatggcagaaattaaaccaaattcattagttgggtttaaaacaaaatccaatcgtggtatatgtcgctttaaatgtactctttcaaaataaaatgatgcagagagacttaaaacaaagggtggacaaaaatttactacatggacacaaagacaaagaaagcagggatcgtgatatgaatttcagtcaaagaatagatcaagggaaacacattgaatggggcaaaggagttttattacaccaataactatgtagtccatggcaacgtgacagtacacatacatatttatgtactgtgtaacacagcatgaaaatgctggaataagagcagttgaaagtcaaagaaaaatgtcagaattttgattgaaatggaagatgttaatacacccatcctaaatccattttcttcacaaagatgggtaggggagaaggcagaatatagtctagaagactgtttggaagatgaaataataaagtaaatgacataaagacttagaataaatatgcaagatgaatgaacgtttaattattgctcatgttcacatgttaaaattgttaaaaaataaacaattttttaacagctactacatgctcagcctagaactagattatggggcttgcttaatatgccttttgttcagataactatggagattttttttcaaaattggtcatacactagatcacaaagaaagccccaattaatttccaaaaaaaaaaaaaaaaagcagaaattgaacaagctacatttcttcaccacaatgcaataaacctggaaactaataacaaaaatttaaagagcaacaacaaggaaatctcaacccttggaaatttttaagtgatttaaatactaaagtcaaagaggatatcaaaatcttaagtaattatatacaagattgccttcacacttgtgttttcaattctctcaccagagcgactccatcttgaaaacgggatgggtaaaataaggctgagacctactgggtgacatgcccaggagtttaaggcattcttagtcacaggatgagacaggaggtcagcagaagatacaggtcacaaagaccttgctgataaaacagcatgtggtaaggaagcacgccagatcccaccaaaactgagatggggatgaaagtgacctctggttgtcctcatcgctttttatatgctaattataatacattagcatgctaaaagacactcccacaagctccattaaagtttacagatgtcatggtaacatctggaagctaccctatatgaactaaaaaggggaggaaacctcagctccaggaattgcctattgctttccaggaaaactcatgaataatccattccttgtttagcatataatcaggaagtaacaataagcataagcagctgagtagcctaagcggctactaagaaactttgcttttactttactctatggatttgcctccaattttttcttgcatgacagccaagagccctctcttgggacctggatcgggatccctttccggtaatgctttttcttcagattaactaaggattcatataatattttaaatatttaaataattcataaacatgcaacttgaaaagttaagggcccatgccaggcacagtggctcatgcctgtaatcccaacactgtgggaggtcaagggaggcggattactcgagcccaggattttgagaccagcctgggcaatatggtgaaaccccgtctctacaaaaaatacaaaaattagccaggcatgttggtgctcgcctgtagtcccagctacttgggaggctgaggtaagaggatcacttaagcctgggtggtggatgttgcaatgagccaaaattgtaccactgcactccagcctgggtgactgagaaagactgtctccaaaagaaaaaaaaaatgttaagggcccagtaatcccacactccagggataatcactgactcctttctttgagattctgaaacaaagatataagttaaaaagtagaaagaatgtatctttttcaatgtcccttccttcttagaaactcctctctcttgtgaaccatatctttggagagggagatgcagttatataagcactgtttaggtaatttctaatacatggaaatagttaagtatcttctgatattctctactgtcttctggggtagctatgctatggtgcttgagcagggtaatgttacccagtatcagcagccaccaacaaaaaagaattgccataatgattatgatgatgattttatagcgcagggtccagagtaaaaaattgcacttttcaaatcatttacacatgacactcacttctacctgttctgctcagcagagaggagaggagaggagagaaacaaattgctgagttgccagctctgggcaatgcttccagaaccaacagtgcttggtttactttaaaggggaaataacttcattagaaatgacattttcttggctagctggtccccaagcctgcaaaagtgccccatgagcacttgtgctctctgcagctgactgaagcggccacttgagtctcttgggaccctcagatgggaggtcaaatctgccaaaaatgagataagtccatgtgtcctcacgggttttctttgatgagtatctctgttataagtgcagcctccccagcactctctcttcctcttcctggtttagcttgaatactgtggcttgactaccacacattcaccttgtttgtctggtttattgcctctccctcccgattagattgtgagttcagagagaacaaggggatttttctgtttagctcactgctgtagctccagtgcctatgacagtgcttggcgcatagtaggtactcaataaacacttttgaataaataacccccgaattcatttctatggtaaaagatgttttcctggggaagggcagagcaaaatggcccccaagttctggaaaagactgagattctaggaccatccatgcatggagcaatgtgggcagaggaagcatgttttcaagagagtgggtggaaggggagaaaggaaaacttgacaggaagaaaggagcagaggccgggtgtcttcagcacttacctggcaccctttatctataaaaccgggtccctctgcagctgaaaaaggaagagaagagagagggacatggggccaggtctacctgtctgtccacttctcccttttgcccatgtatccaacctcttaggaattgctgtcagctcaaccttcaaaataattaagaatccaactacctctctccaccacccctgctctgagcctgctaccagccaccatctctagcctgaactatttcaatcgcctcctcgcttatttccacctctgcccggacagtgggctctccaaacagcattagactgagctctcagcaataacagatcaggttatcctctgctcaaacccttacggctcaaatcccaccttccctgaggactactctgaccacactttcatgcgcgtctgtgtgaagagaccaccaaacaggctttgtgtgagcaacatggctgtttatttcacctgggtgcaggtgggctgagtccaaaaagagagtcagcaaagagtggtggattattattagttcttataggttttgggttaggcagtgaagttaagagcaatgttttgtgggcggggtggatctcacaaagtacattctcaagggtggggagaattacaaagaaccttcttaagggtgggggagattacaaagtacattgattagttagggtggggcgggaacaaatcacaatggtggaatgtcatcagttaaggctatgtttacttcttttgtggatcttcagttacttcaggccacgtggatgtatacgtgcaagtcacaggggatgcgatggcttggcttgggctcagaggcctgacattcctgccttcttatattaataagaaaaataaaacaaaatagtgttgaagtcttggggcggtgaaaatttgtgggggttggtgtggagagagaatgggcgatgtttctcagggctgcttcgagcgggattaggggtggcgtgggaacctagagtgggagagattaagctgaaggaagattttgtggtaaggggtgatattgtggggttgttagaagaaacatttgttgtgtagaattattggtgatggcctggatatggttttgtatgaattgaaaaactaaatggaataagagaaggagaaaaacaggtataaaaggtctaagaattgggacgactcaggacatctgattagagagtgcctaaggagattcagcatagccctgccagcaaagattatttacttcaagagttaagaatggcagtttggggatagcacgaggcaagcgtgatcagggtgaggaacagcaaagaaggaaatatggggaaatggggtgaatatcaggtggatcagagagatacagtcatgggggtcaggtgtggtatcaggaataatgtgggaggccagattgaagtccgggccaggaacaatggtaattgtgggacttaaagagtgagtacagctgaaggagccggggagcagaaagtatatgtgtcaggtatgaggaagaaaatagattttggaagttatgagaaatgtagagagtgagttgagcatagtttgtgatttttagggcctctaacggtattaaagcagcggcagccgctgcacgcagacatgagggctaggctaaaacagtaaggtcaagttgtttggacagaaaggctacacggtgtggtcctggctcttgtgtaagaattctgaccgcactaaccatgcctaggaaggaaaggagttgttcttttgtaagggattgaggtttgggagattaatcggacatgatcagcaggaagagcacatgtgtttctatgagaattatgccgagataggtaacagatgaggatgaaatttgggcttgactgaagtaatgggggctgtccgcgaagccttgcggcagtacagcccaggtaatttactgagcctaatgggtgtcagggtcagtctaagtgaaggcaaagagaggctgggatgaagggtgcaaaggaatagtaaagaaagcatgtttgagatccagaacagaataatgggtagtagagggaggtattgaggataggagagtatatgggtttggcaccacagggtggataggcaaaacaatttggttgataaggtgcagattctgaactaacttgtaagccttgcctggttttaggacaggtgaaatgggggaatggtaaggagagtttataggtgcccatgctgtagcaggcgagtgataacaggctttaatccttttaaagcatgctgtgggataggatattggcgttgagcggggtaagggtgattcagttttaatgagatggtaaggggtgcgtgatcagtcaccaaggagggagtagaggtctcttatacttgtgggttaaggtgggggaatacaagaggaggacgcaaaggaggctttggattgggaagaagggcagcaatgagatgcggctgtagtccaggaatagtcagggaagcagataatttggttaaaatatctcggcctaataagggaagtgggcaggtggagataactaaaaaagagtgcttaaaagagtgttgtctaagttggcaccagagttggggagttttaagaggtttagaagcctggctgtcaatacccacaacagttatggaggcaagggaaacaggcccttgaaaagaaggtaatgtggagtgggtagcctccatattgattaagaaggggacggacttaccttccactctgagagttacccaaagctcggcgtccgtgatggcctacggggcttccgaggcgatcgggcagcatcagtcttcagccgctaagccgagaaggagtcagtcagagagcctcgggccagagttccaggggctcggggagtggctgccaggtgagttgaacagtctaatttccagtggggtcccgcacagatgggacacggcttaggaggaatcctgggctgcaggcattccttgccctggtggtcagatttctggcacttgtagcaagctcctgggggaggaggttctagaagaacgcctggccgctgcggttcaggcatttggaagttcttgtatgctggagatgtggctggggtttgtctcacagtggagccaaggaattgcaacttttttctattattgtacaccttgaaggcgaggttaattaaatcctgttgtggggtttgagggccggaatttaatttttggagttttatttaatgtcgggagcagatcgggtaataaaatgtatattgagaataagatggccttttgaccttttagggtctagggctgtaaagcgtctcagggttgctgccgaacgagccatgaactgggctgggtttttatatttgatgaaaaagagcctaaacgctatgtgatttgggataatgaaaaaggagcattaaccctgactatgcctttggctccagccacctttttaagagtaaactgctgggcaggtgggggagggctagtcacagaatgaaactataagtcggaccaggtgtgggatgaagggaggggaggcgcggaggctgaggaagaattgggacctagcttgggctggcgcggaggggagaggtcagatgggtctgtagaagaggaagattagaaagactcagcgccgcttggggttgggactgaggggacaggagggagggaaagaaggaagatttgggacgagttgcacggggcacagagactaggaagggactgatgtgtaaaagaatgcctggacgtcaggcacctcagaccatttgcccattttacgacaagaattatttagatcttgtaggatggaaaaattgaaagcgccgttttccagctatttggaactactgtcgagtttgtattggggtcaagcggcattgcagaagaaaataaggcatttaggttttaggtcaggtgtgagttgaagaggttttaagtttttgagaacacaggctaagggagaacaaggaggaatggaaggtggaagcctacccatagtgaaggaggcaagcccagagaaaagagtagagacatggagaaggggtggggagttcttgccctccagaaaagcagagaaagggttggggcacggaaataagggattggggcacagagataagaggttggggtgcggaaataagcgattgggaggttcttgcccctaggaaagcgggacttgccgctaagggtgaaggagaaggggttgaggggtacttgcccctgccccaggaaaggcagagaaggggtagagacaaggagagaaggggttggggtacttgccccttccccagaaaagcaggacttgccgctaagggtgaaggaccaaggcaggcgtccctgcgtggtctgacacccttgaaacgtgggtgtataatcacagaggcatccctgcaatgattaaacaccaagggaaggctgccttcccagtccgtgaccggcgccggagttttgggtccacggataaaacgtgtctcttttgtctctaccagaaaatgaaaggaattgaaattaagagaagggagagattgaagtgtagcgccaagattgaaaggagaaagaggttgagggatagtgaggcaagttggagaagagagtaaaaagaggccgcttactggatttgaaattggtgagatgtttcttgggctggtcggtcctgaggtcgtaggtggatctttctcacagagcaaagagcaggaggacaggggattgatctcccaagggaggtcccccaatctgagtcacgacaccaaatttcatgcgcgtccgtgtgaagagaccaccaaacaggctttgtgtgagcaacatggctgtttatttcacctgggtgcaggtgggctgagtccaaacagagagtcagcaaagagtggtggattattattagttcttataggttttgagataggcggtgaagttaagagcaatgttttgtgggcaggggtggatctcacaaagtacattctcaagggtggggagaattacaaagaaccttcttaagggtgggggagattacaaagtacattgattagttagggtggggcgggaacaaatcacaatggtggaatgtcatcagttaaggctatgtttacttcttttgtggatcttcagttacttcagaccatctggatgtatacgtgcaagtcacaggggatgcgatggcttggcttgggctcagaggcctgacacacaccatctatttaattctgtgacctgctccagacacaagcactctgggcccccatattctttttcttgttttccctatcaccgacctcttccaacaccccaaataatttacttagggatggccatggtttaccctctgtctcccacttcttccccgcaggccttcagctcccccaggtgagggagacctttgctttgttcaccgacatatcccaagcattagaactgcgcctggcaccagcaggtgttcaattatttatttaatgggtgacttggagcagaaaccgaagtgcagtggactgttttcctgggatctgagctgatgataaatgataaataagtcttgggattttagaaggcaggaatcacgaaaaccaacaccaatgaaatccaagtctcctctgctactatctgaagtggaacagaacagaaataaggtctgttttctttccgcttcgctgttctgtttctgtccaaaacaaccgtctctctgacaccttcgaggtgtccctttgtctctttgaggttccctccgtgacactggctactttgtaactctaacactgtcagcaattaattcccaaaggtgaggtccccgtgggaagtgggaaaacccagcgaatcaccagggacccgcctgattccgaaaaggctggatgctggctgggaaccggccccgcagctccggcgtccccgcctgcctgcgcggccttcagctggggttacggagggctcccagcgccgatccaaaccgcgttccaggcggggtgggcgggcccctggccagcgaggccgaagcaaaacaacccgcccaggcgtccagagcgtatccaaccctggagaacctgccccggaaccaagagccgcagccagctcaggcctctcgagtggggcctttccagcccctgcaacagatcccgggatctgtagttgggcggaggggctcgttatgggaaaggggtgcgtgcgcgtttgtgctaaaacaagaaaggcaagaatctccgagaacaaaactctggtcctcgcctggccggggaccgcagaagacaggggcggcagcgccaaggcgggtcaggggccggtccagccaagtttgctccggcttagataaactttctgatggcagtttttcctggttgcagcctgggttccttgtaacagggtaagcgtagcgggtggttgtcaagaggggcggaggctggcggttacagggaatggagggatgggccggacctggggtcgcgcaggcgccttggtcgctgcctccgatccgatcacccccgccccatctcctctgcgagctcaggaaggtggctgggggagggggatggctccctactgccgagggacggcccgaggcaaacacaaagcccttccctcccctcctcctctttcctctcctctcccctcccctcccctcctttctcccccttcctcctcttcctcctcctcctcttgctcctcccgggcggggaaacccagccccgcgctcgtctttggggccaccggtcgcccccgcctccgggacctgcggggagggcccgcgagaggtaaggggcggtggcagcggagaccccaccccctgtgcccgcacctagagagcccggagaggctccgggcacgggcggggctctctggggttccagacgtgggtgctgctgtgcgcactctctccctactccggaggggacttgaggaagacagccagagcgcgtcctcggggatcgtggggaacggaagggggaagggggatcagggagtggggacaaggggcagagtgacattccggagcgcgaggtggccgctggtcccggcagggtcaccgggtgtcctcagctgacctgtgcggggctggggtgagggacagctggagggtgcaggcactatggctcgaggtgcggaggtgcgggtgtgcgtgcgtgtgcaccggacggagtttggtagggacctttgaggagttctacctgcagggctgcctgtggggtgtcaagtgctccctgcgcctgagcgcgcgggtcagacccggtgtcgcacagctttgatccccagcgcggaccccactggtgagtccagccagtgtgcagggcagatgctccgaccggagatttcctcccccgggtggaaaagcaggagggttgttgtgtccgggcagggggcacttgggctgtcgcggtgattgatggctgcgcagcgggcggaggaggagccccggattcctgccgggaagggacggggccactttcccactttgaggcctccccgcccccttctgggcttggcctccacccttggcctgggctcccaccagctcggcgtccacccaccggcggtggcgcgcccctcgaccgcgcggggacagcaggatttgcagaagttcagcttgaaagcctatgatatgttgccaagaaatacagggcaagatcggtcccctgggccctgagaggcgcctgtcttctcagagctcttaaatccctggggctttcctaattccgcagtgtagcggcacttccttgcgcggttttgggcacattggggtttcttaggaacacgctgtcatcggtaaggaaacatcagagtactcttcgaccaaaaggactgtaaatactgaagcaaaaagaaacacttgctgggagtgcaaagggcttactgggaaaaaagaaacacacagggcagcactccatcattaagataaatagtattttaatacaatctttttaacaaaaccaaattgaatgtaaaaaattcatgataagcaaaaatcaacattttaaatacaggtgggtgttgttagaaccctgcttcataggccgggtgcagtggcttatgcctgtaatcccagcacttagggaggccaaggcaggcagatcacttgaggtcaggagttcaagaccagcctggccaacagggtgaaaccccatctctactaaaaatacaaaaattagctgggcctgaaggcatgtgcctgtggtcccagctactcgggaggctgaggtgggagaatcacttgaacctgggggcagaggttgcagtaagccgacattgtgccactccactcagcctgggtgacagagtgaaactctgtctaaaaaaaaagaaccctgcttcattgttcaatgggaacagtcatatccagtctccctcccccacctccccatttgtttgttcccttgcctggtggtttgagagttgacagtggcatgcaacagattgagcaactctggcttcagatgtagtcacgttcactgaatgcagagcttttattaactttttacctaattcaaatgtaggaggatattgtcataagtggatatagaggtgctaattttcctttttgcctcaggttccaatattgcctctggaatactcatgcactcccgtgctttggcacctccagagagagcatcacaggctagggatgggtagggtcccgggacagtgaagggcccttgcttttggaacttgggaagaaggctgttgacaggagcttttgggtttggagacttgctctcagtagttggaggctggagacacggggaaaaccaacctgctatcaagacctttgtctggaaacattctcctgcagacagttcatcagagcagaggaggaaactgaaatagcccacacttgacctctagtgtagggcaggtgggagggagcttgactcccaggatggctatggcgtgtgcttatttaaagataacttcgcagcagcactcttatccccacccaaggtgtcctgccatacaccttatccaaagtcaagggtcactacccacttcaggacttccactttccagaaagaacctccttgcttagctaaaccctcttcctctgcttggaggacacagatgaatcaggtatcacagatgaaacacagggtatgctaccctgagaggtccatgctcgtgtgacccattaatgggaggcccattcttcacatactctctgtattatagtgctttgaccttgtgcccaattccccttgtatatccaacctacctaatgaaccttcaagaatcctaatagtttcagcaagaaagatttccccgaccctgtcctcctttccccagtaagacaccccctcactgccaccagaattccttgtgtgtgtgtatgtgtatgtatctcttaaagcaatacagtggacctcacttgcccactgtctgtaagcttcccagggtccaaaaccaggccatagcccttaagacctaccactcaaggagggggtgttgaatgaatgaatgaacaaaagtgtccctttgtcaaggcattttgagaagttgcacagcaagaagtataccctcaggactgtaatgcctctgaagaaagcaggtaacatttttgtagcacattataaaatggatttacaaatagtatctcagtcgtttctcacaacagtagtattcattgcattttgtaggtgaggaaatgaaagcctaaaattagtctgtcattctgccgcagcacagtggacttgctaaaggcgaacctgcccagaggcacactccatgcagtgtatgtacagagcaggattcaccgagttgtgttttaggatgcagttttgctaaacaatcactaatgagttacagtgataaaatatgttagggaaatgctaatgttgtctgtttttttatggcaggactttaaggagtctttattgttataccatacattgggactctttagaatgacaccatagtatgggatgcttgccaactttatttggccacagaacactctttctcatgaagtatcttctggatccagtgttccaaggaattcacctagggaattgtttagttctcccaaaatcttataatgtctaggccaacttccaaggaatgttgattccatctaatatgtggtattttggatagtaaaaatgtatattctggacactagaaaagcataataatccacccttgtcaatttagagtggattgttgatctgtgtatccaattaactcaagtagcttccatgcatccgattaatatgaataggttctttgggtttgatcagatatgatctgagggaaccccagcctctggagagcactgcctttttgctgcccagaagccttcagatttcaaccagcctttccaactctgagaatcccctcaaacgcagctctgtagatggggtggcaacttcagggttcttgtcctgagatcactatttcatcttggctagttacatccattgagtgagaaagtacacctgctcagtgaattttctgttctctcattcctctctccttgggtgctggccaagtgaattctctagggtgtctaagtgtgtgtggacatttgcttatgaaaagtaagtaaatgtcactctctgggtgtctcagacctggaacagaagcctgctaacagcaatccctcctcataggagctgcagcccccgttcacaagcaaccattgtttgaaatcaggtatttttaaatcagagtttgccttcaatctactgttagagcaccttccacagaccagtaacctcagctattgaggctttattgcaattaaggagacaaagtgaggaagttggagttagaatttcagggactcaaaggagaattgtgggctagtggaggagccttcggaaagtgatcaaagaggcacagctgtgcaaatttaacattcatctgcagacatttctaggtctccaatgctgagcaaatatatctcaagatttgtttcgtagatttttcgaaagcacaaaaagtaacaattctcatttagagatatgtattaaacagggtggtgtcacagaagtcaagggaaggagtgttttgagaaaaatggacctatcagatggggcgggatggggagtgacaaggggagttgaagaagatgactagaaggctgatgggtcattagccaagccgtggagttcaagtgtgtgtgtgagcatgcacatgtcatcgtgctgtgcgaacaagggagaaggtagggaagaaacactgaatgtgatttattttatttatttatttatttatttagagatagagtttcgctcttgttgcccaggctggagtgcagtggtgcgatctcggctcactacaacctccacctcccggagtcaagcgattctcctgcctcagcctcctgaatagctgggattacaggtgcccgccaccacacctggctaattttttgtatttttagtagagatggggtttcatgatgttggccaggctggtctcgaactcctgacctcgggtaatccacccaccttggcctcccaaaatgcagcaattacaggcgtgtgccaccatgcacaggcctaaatgtgatttttaacctgttgagtttaaaagtcctggccaggtgcagtggctcatgcctgtaatcctagcactatgggaggctgaggtgggcagatcacttgaggttaggagttcaaggccagcctgaccaacatggtgaaaccctgtctctactaaaaataccaaaaaaattagctgggcctggtggcaggcccctgtagtcctcgctacttcagaggctaaggcaggagaatcccctgaacccgggaggcagaggttgcagtgagccaggatcactccattgcactccagcctgggtgacagagcaagactctgtctctaaataaataaataaataaataagatatatatgtatatcagcacagagaagtgtggaatgtcagctgaaagtgtgaatagaaccacacaagtgaatacagccgctagcaaaaccactcaatagcataatcacataatgaatgagtgaatgaatgaatgaatgattaaatgacactgttttttgtagcagaaactgtttttaaactcactaatagttaggtgaaagtttaaacacagtcattttgtgaaagagtctaagaaaataaaattgaattttttaacgctgtgggtattccagcctgtgtgagatgtcttattctggtcaaaaagctttggttgtaagaacctccattactaacgttgaatgatgctccatgattgagagcccctgattcagtttgatgtaggaatggttataaaggtatgctggtttgttttaaaaaccatcctaagagtgatttaaaagacgttgctggactttatagtatccaaatgagaaacggattcgggaggtgttctaattcctactatgagtgtatatctcatttttatttgatgataccatctggccaagtgatagtacatggagtattaatacataaccccccacttgcttaaaattctcaaaatttgagtcatttcaaaaatcagatttggaaacatttgtatttttaatgagtgaagtctttttttaagtaagttaatccaataaattggataaagagactttttgttttttatgtacctgattttatttggtagatcaggaattcaaaatttaaaaaaagctagattaaatagttagctagatgaactttagttattaaagaaattgttaccgatttttcccaaatactgaactcccccattgcattttaactatggctcgattacaagaatacttttaaaacatgaatggaagcagacatctgtcctgtgtggtaactgagggcagctgtgcatggaaacctttgagtctcggaaagtcagccaggatcccacaccaggggaagttgagtgctgagaccagtcacctcgtctatgcaggacctagcagtcctgggtgtgtctgacttcagcacacccatgtccagataagggacgtggaacctaaacgctcatcatcttgctatccagactttccttgcttaagtgctaaatgtttatcgcttcagcgatacacattttgttatacaaaatctttaaccttttgcatcatcaaatgtttgtgctttttcttaaaatttccttagtggctcttctgcatagaaaacctttccacttcctcaatcaattacctagccttttatattttcttctaatgtttatgctttcagtttttcagattactatttaaattcatttgagatcatttggcaggtggtttatagagtaggaacaaaagtttattcctttttccccatagttttcccctaggtctggcatcatttggtgaataaacctgcctttccccagctccataacacatacaaattctactaggaagggcaagtcccacttcactttctgcgtttttttttttttttttttttttttgacagagtcttgctctgtctcccaggcaggagtgcagtggcatgatctcagctcactgcaacctctgcctaccaggttgtacttttagtagagacggggtttcaccatgttggccaggctggtctcgaactcctgacctaaagtgatccacctgcctcagcctcccaaagtgctgggattacaggcgtgagccaccgtgccaggccactttctgcccttttatcttctcccccacccccaaatcttcttggcaaattcacttattaattcttccagtgaaattttattccaggggatttgtttggaattatattaagcctaatttgggaagacccgaaagatagtttgggatcctctttttctgggaaaccatgacattgaattagagccagtgggcattgattgtatgtgttcaggccacacatgcacactgatccctggggtggctggtgaggaaggcacaaacccagactggaggagactggcttctggtttcagctctgctgggaggtgtgggaccttggctggctcaaaggttcatttgcactcatgtgtgtaggcgctcctttaggattccaggcttcaaggacctagcagcctagcaggggatacttacacagactgggaagggcaggacagtgtggtcagtgcttgacttgagagacagacatacttgtgttgagtttgaactggaagacccctaattcaagttctttgttgctttcctttgcaatggtttttctccttgataatttagggatcccacaaagtcagaggctcttgtctttttagaaaaggcatttatccctcttccttttatgaagtaagcacagggatcttgggggtgggatggggtgggtttaggagattcctctggctctctgctagactaatgttgttgaaggaaggtgacttcatcctcatggatggcaagaccctttggaaggtttcatggcttgtgagaaaaggaggctacagagggagggagggaaggagggacagccagtgggatggaccaggcacagatggggagaatggtcctcctaggttgacggaggcgctttattagggtggcttcttcaaagcttcttatcccctcagtcctgtgaggtctgatgtctgaagtgacagtcagacagctccctgtccttccctcatggtgggaggctgctcctggccatctgtcatggatggggcacccacccatcctctctgtattccgggattcctgccttaacagatggtgtgtgtttcgtatgacaaacactgtctctgggcacacctcataccctagttttccccaatatttgcagctaatgtctttccctaaacagtttacaggatgaccttagaccacatatatgatctaaataatacaaataacctactacactttagtatcagcttaggcactctccctcttttaaactgtgcttccatgggacgttgggatcagaggtagagtcatttcaaagaacagggctaggaaagggcagattcaaggttggttcccagaccactttctattcaagggcaatgtggttgcatacagaaggggtacttcatcctttcctgggcatcagaaaaggattcacaatggaagagatgtctaagctacggtggatggaatcatcagtgttaactaataacacgtgggttccaggcaggagcggcaagtacaaagagtgagaaataagctgggtgtgatggctcacacctgtaatcccagcactttgagaggctgaggcaggcagatcacttgaagtcaggagttcaagaccaccctggccaatatggtgaaaccccatctctactacaaatgcaaaaattagctgggcgttgtggcacgcacctgctactcgggagattgaggcaagagaattgcttgaacccgggaggcggaggttgcagtgagctgagatcgcgccactgcactccagcctgggcaatagcgtgagactccatctcagaaaaaaaaaaaaaagaaaaaaaagagtgagaaacaagagaggcttggagcacctagggaaggaacgtggagtttgtaggggccaagggaaaagttctccttcacctgctgaaggtttgctgtaaaatcaactcagaaaaggcaggttaattggggaaaaggcatacagatttacttaacgtgtctacagaggagccttcagaatgaagacccaaaatacaggggaaattgtgtttatgtttaggttcaacaaatatggacagccgtgtagaaatgtgactggacaaacagtctgattgagtgcgaacagactgcttggggagatccagcaaggcctgtctgtctagattcctcctggtctctctgagcagcattcctttcttccaggtatggagctgaccctctccggaatgctcttatgacctatagttagtcacagtaggtcagacagtttctttatggccagtttttacacagaatggtggagggaaagttacagcagtaagtttaggttttgtggctggctctggggaaaagaggttatgggtcctatgacccactttgaaggagaattctagtttctctggctagcctcagggaggatgggactgagagaccagagggcaggaggtcagagaatgacttttgcttctgaggccctcattttggggtactgttttctgagctcctgcgagttcattatggcaccacttagaatgcgaggctcctggccaggcgtggtggctcactcctgtaatcccaggactttgtgggggctaaggcgggtggatcacctgaggtcaggagttcgagaccagcctggccaacatggcgaaaccctgtctctactaaaaatacaaaaattagctgggcgtggtggcaggtgcccataatcccagctactcaggaggctgaggtaggagaatcacttgaacctgagaggcagaggttgcagggagccgagatcacgccactgcactccagcctgggcaacagagcaaaactgtctcaaaaaaaaaaaaaaaaatcaatgcaagtctcctgcgaaacatggagagagacggaggatgtgacccagaccctctgagggcttcagtccagggagggaggcaagaactgtacctgcaggacaagtggaggacaacttaggagagcgtcatgtcccaatgatccagactgtgtgtcacgatggagaaagtctgtgagggaaacaaaccaggttctgcctggtctctccctatgttttgatctaaatagcatctcaggctccttgtctataacaggagatgagggaaggtctcagaccaggttccctagaagcagaccccgaggtgaggattcatggaaaatggatgaagaaatattcacaggaaaacaggagagtggggaaagggggccagaggcaaggaagctgagcagtggtgcaaactggaatgctctggaaacagtgggagccccacaagagtagccagatcggaggccagctttctggagacgctctacccctgcatcagtcagactaagggttgccccaagtgcttccagctctctctgcatgcgggcaaagcgagtcccatagagagcatcctctgacagggacccaggtgctggctgtggcttgcaaatgtgcatgaaaatgatttaggactctgaaggcacagggacagggcgtggcagcatttgccagagtgggatacctgttctcatcctcacacaggcagacagagtggattgttatgaataattcattgtcatttcttgtgacctcctgatcgtatgaggagcaggagtttcttactgacattacacagcatgatgccatgtgtggcttactggcccctcagaggttatgctggcccaccagaaaccgtctctcctctatgtgcttatttcccacacttctggtgctgatttttatgcctttagaccttattggaaatattcaatataattacaagatacctatagatatataaatattcttcttggaaatactttgctttctgtttctttttttttttttttttgagaccgagtctcgctctgtcacccaggctggagtacaaagtcgcactctcggctcactgcaacctctgcctcttgggttcaagtgattcgcctgcctcagcctcctgagtagctggaattacaggtgcccaccgccacgcccagctaatttttgtgtttttagtagagatgggctttcaccatgttggccaggctggtcttgaactcctgacctcaggtgatccacgcgccttggccacgcgccttggcctcccaaagtgctgggattacaggcatgagccaccgtgccgtgcccggccagctttctgtttctattattattggctctgagttccttgaagggtaagtaatgaataggatagaggacattgaaagctgtgggtctaggagaccagagaatatgaagatctgaagaagaatcttctaactaggtcagggcacagcacacaccctcaccacccaggctagtagtttgtcaaatccttactcaaatacacatgagtatctgaatgcataggcaccttcccacctccatccgttctgtgccgtagtcatcatcatcgaccctccatctctggtaggttgcacaagccctgccagtgaagtgtaacagggttggatatgtaaattacttcaaactagcagatcacaagagatttcagagatgaagcacgttgttgttaccaggcggctgcaatttgacatgaagctcctaccagtgacaaaccactagtaagaattccatgtgtttgctattctgagcatgcagcagctggagtaatggctgagaaagcagaataacatgacagggccatatgaaatcagatattttaaatactgtgtttcaagacctcaggaggtggatcatgataagctctaatttgaactgctgatataaggtggaaatcaacctcttttgaaagttttttactaaggtatatttcacttagcttaagaatcaataaacaataaaaataattattgtaagagaaaaagtaatcaaccccaagagcaaaagaaaatgaacagcagaaaaggaaaagcgaatattttagctatagtttcctataagcgcatttaaacctcttggttgtagttggtctttaacattctgaggaattgtttctatttctcatggaagatggtgtaatgaaggtatgaaaggctccaggaaaagctatgctcaagttttttagagagacaaaaagagcctggcataagaactaagacttcatatttcacaaggattatgatgcttttacaaaataaatatcattctagaagcaaagataaaaagtaataaatttagcaaaataactgttgaaggttgactgagctgaaggaactatgcaattaaggattatttaatttaacaggactgcctttgaggaaaacaatgttgggtgagtgctggagaaattgacccagctatgataccatttgacttcaaaattgtttacatgccatgtgaaaagcccagcgcagaggcaaggagaaagccctctgacccttaaagcatttcccaatgagccattttaacagaacctctctgcaaatgagcatttctaaggggacacaattcccctgccctccatctggaggaggaaatgtgaaatcttgttttccctgcggagctgcttccgctcagtcaccaccaagctctgcaactcatggctctgcccccagcctctgtccctcttccacctcctgctgcctccttcccagcaagaattccatgttttcacgtataacctgtacgtgaaaaaaacaaaaacgtgtttttcctctgctctcacaacaatcaccaacacagaagccttctgtgaccaaatgtgtggggtttttccccacacaccaagtagtggacaccagctgggcatcctccagctcaattcccacagggtgagggctgagtctcacaagactgcccccaccccccccccccaccttcccactagggccgcaagtcccggcctccggatctgctgacagacccggcatcaagtgggggttcccacagccccttcttcgagttcaactaatttgctagagtagctcacagagctcagggaaacacaaatatttattggattattgtaaaggatattgcaaaggatacagatgaagagaagcacagggggaggccagcttccaagaagctttctgaatgcaggcctttggcgtgtttgtggaagcttcattacctaggtctgcctggtcaaaccattggctattggtgatcaacttaaccttcagcccctctcctgtccctggaggtgagacagtggtcaaagtcccagtcctctaatcctgccttggtctttcctgtaaccagggactgccagctgtcaatcagctcattagcatgcagaaacatcactttggagattctaaggatttttggagttgtatggcaggaaacagggttaaagaccaggtatatgtttcataatatatcacataacacctcctttgcgtattcctcatttctcttgcctggtctctctcagggcactccccgaactcaaccccaacccctgctgaagcacacttcccctgggctgtccctgcaccaggcagacggacatggccaggaagaccacggcatccttaagggattcacggctgtcggtctcgaggggtccagctccctttccgtagtccatccacacacctcttcggatccatcttcgacatacttgtttttcaaattacatttttatatgcataggagtgaaggagagtttggggaactaacactgctttggtatttcctttcttctcctctctgatcctatcctctttcatttcattaaaacgctctgacagcagcttttctaaattgctttcacaacccactaatgggctttgaaaaaaacatgccctgaatgattgttccactccgactctcccttctcaagcctcctgcctcctcctgcctcctcttgccctcctcactctctcgttattttgagacaggatcttgctctgttgcacagaaactagaactaatctgcagaacttccatgactcccaaacactaccaagccacctgcatgccgactgtaggctccagctccctcctgcttccgtggatagaacagatgcgcgctctcagttatgcagtccacccaggcttctctcagatactcaagggcattactgcagcaattgtcccgctctttgctgggtcaccagtttctcaccctgtttcctgggtcatttccatccagctggattcatactgtagtatggcccaactttagagaaccttctcttgactccacttttacttccagctcccacatcttttctcagctttcattttacaaagaactctttacgagtgcatcggtgctcactgtccccaagtctcttcctccacttcttccgttgtaccactctagccaggatactgccccctgaactgattttgtcaaggtcaccgatgacccccctgttttcaaatccagtggtcagtctttgatccccatatgatgtgattttctagcagcatctgacattaaaccaaggatggggcccttctgaatgcagggccctgtgtgactgaacagtttgggtgccacgaagccagccctggaaccatgctgatcttgggtttcatgtcacaagagacacaagcttccactgacaagcactccaagatcccaaggaataatcccagcagctaaaagggtcccggcactgcctgagccagacctctgttcaggacttcacatggctgcctcatctcagaaccctgaccagcctgtgagatgatcacttcgtgcctcatccccctggtatgcatgaagtcgttttatgcttttttccccaaattatagaaactgaggcacagagagatggagtgatttgtctgtagtcacaaagcttgaaagtggggaagccacaattcactcctggtctgtcaaacaccaggacctacacttgtagcaatgactctgtaataacctcagggtgtccctgtgtagaaatacaggcatgcattaattttctagggttgctgtaacaaaataccacaaacaaggtggctcgaaacaacagaaatttattgtctcacagttctggagtccagaagtctgaaatcaaggtgttggcagggctgtgctccctctgacggtggtagggaaggagctgttccaggcctcccggcttctggaagcctcaagcatgccttgtagatgcatccctccagtcctccatgctcacacattctccctgagtgtcctcacatcgtcctccaggtttcccctttcctgttggattggggctcatctgatgacctcatctaaattagttaaatctgcatagaccccatttccaaataaggtaatatccaatgctagtaggggtgagaactccaacatatctctttgtggggacacaattcaacccataactaggtgtaaaattagaaactgatgagatatccaggaagtgtgaccagtgcacacaatcagaaaatagagtcaggcattctcagcagtaaatagctattccaggtcaaagggctgggtgtgagttgcctccatcttgtcttgttctgctgttgttggggaggccttagcaccttctgaggtgggtgaaagcagagaatgggagctgaaggcttaaagaaagggccaagcgaggtgggtggttcctgagctttgatttggtggcgtgctgtctattagaccaccctgactggtttctgtgatctctccatggtactgctgagtgccaggtacatctctttggaggtattgatgcttaatgaacggcagcttctccttcctgctggctgaggtgcatgagaggccaaatgactgtatttgggagatgtgcggtacaatttcaaaatgcctgataatacagtgatctggttacaatcactattaaaatcacatcatggattgtgataataaaaataaaataatatatactagatgataaatattataaaatattatatatatataataaagataaaggaaatatgtttagcttcatataaaaatcaccatcatgcccttgatttgcccctgaccagcacccagttcccatgaccttggagcttcctgcattctgaccctgagcttctgtcccatggagcaactgtgtttatgggctgtcaaccagctaccataggcaggggatggaggcctttataggctcctctcttttatctcacagggaatttttcaagacagagctcaggtttctgaactcaacttacataatgcatctaaaatgacataaatatgaatgtatctcacctatcacccccgagcagccaagtaccagttcactgaatcaggagagagccctgggattgctgaagagggcaggatgatggagttgcataaagaactcaacacaacccaactctgatttatgtctccaaaggaagtcagataggaatgtgaactgggcacatagtatttttcttacaggagcatataataaaagcaatatttttgcaactagagaagaagcgggaaaaagatcaagagtcagagattgcagagaggaattccaagaggaatctttagtcagaaaaagccatgagtctctcttgtcctctgccactgtggcatgtaaaggaattgaaaatgccttgagaaaattattcgtattctagaaaaaggacacaagggagtgggatccatgcatttgctcatcaaatcactattgggtaccaattgtgttgtcaggcactgaacaggcagggtacccgctttgtacttccctgaatctccatggccattgtcccattccaagccattgttctctcttgtgaataggatgatgtaataggatttggtgttacaaagttcaccctgactgctgatcacagacagcatttcagtggagcaagagtggcctcagtgagaccagataggagaagactgtgatcattcagaaactggtccctggctagaggaaagaattggaggcaaaatttggagaatgacccagcaaagctgtggtgaattagatgtgaggagagcagaagagtcaaggatggcccattactgaccacccacattcatggaggcattatttaaggagatgatcaatctggtaggaaaagaagccagagcaatacagagttccacttcgtatgtgttaagtttgatgagcctgtgaaaacccaaggaggtgttaaatatctgggagtctggagcttgaaagagagctttgggctacaaatgcattggtagcagttttcagaatatagaaagcctaaagaggataaaattgtctaagaaaaggatatggagatgttatcctagggttaactcgtgtaataggatggcaataagtgcaaaattttatgttgccaactatggtctccaaagtctgtgaaaacgtggcagtgcaaaggttgactgctggttcatttcactaaattgcgtatcttccctgcaaatggggcccccattgaagtcggtattttggatgttagcatctggctccctcaactgcagaggatttctgactggtggaggtatgcctacccttccaatttggggctgaggacaccacctgatttcaaaaagagactgtagatagactgctgagaggtgacatcactaatttattaagcacatgtgtgtcactcatatacttgccacagtccatgtgctatttattgtatacttacaccagtcttgaagatgagtatttttacccaatttacactggaaaaacagaggcttagagaacacaagcatttgctgaagttcatgttaatcagtggtagaacaggtcttggaccagctctgtccactgacagagtccaaactcctaagtgccaagctgtactgcttctcccaaagcaaacagcctaaggagtatgtccgccccagggccctccattgcttagctgagtatgggactcagctgcagttaggagcctcaccctccacaggctgtcagagcctccggcttcgctccacccaggcaatctggttttacagtttccttctcaaatagaaatactaatactaacaaatatttttgtgatgtgtatagcttattaaagacttacccaggcgttctctggcctcaatcttttatgtgccctaaagtcaaccattaacttcttttcatttccttggtatgtaaaccaaaaataaaactctaagtcccccaactaactgatggacccctccccttggccaaaggcattccaaagttaaccagaaaaactagctcaggccatgatgggaagtgggagtcggacatgcctcattataccctcctccctttgggaattcaggcacagctgaccaacattaacatcaacacagaaaccttaagactgatagaacagattcttgaagtctgatgagaaacatttaccatctcttctctctgaagcttgctacctggaggctttatttgcatgacaaaactttactctccacaaccccttattgattccaggtctttagataataactcttgcaaccaattgccaatcagaaaatctttgaatgtggccaggcactgtagttcacgcctgtaatcctagccctttgggaggctgaggcagatggttcacctgaggtcaggagttcgagacaagcctggccaacatggtgaaaccccatctctactaaaaatgcaaaagttagctgggcatggtggcggctgcctgtagtcccagctactcgggaggctgaggtggaagaattgcttgaacccaggaggtggaggctgcagtgagccgagatcacgccactgcgctccagcctgggtgacagagtgagaccctgtctcaaaaaaaaaaaaaagaaagaaagaaaaaatcttcaaatctgcccacagcctggaaaccccttcccttccgattttcctgcctttccagacgaaaccagtgtacatcttacatgtattgattatgtcttagatgtattgatgtcttatgtccccctagaatgtataaaaccaagctgtagcctgacaccttggtcacatgttctcaggatctccttgggctctaactcaggccactgatcactcatatttggctcagaataaatctcttcatatattttacagagttggactctttttgttgacagataaaataggaaaaggagtgagggaggaaggaggaggtgttcaggggcgggtccatccgggagggaattgttttatcctggcttctccctccatccttcatggtagagtgttggtctttttaaatgtaggaggtttagaagaactgtgtgctcagggccaaagaacacagggaagggcacaggtggaacccctggaaatctcaggggaagagactccaagtccctgaatctctttccctcttcaccccactaggccccttctgcttcatgctcatctgccccactggggcctttggagcagggtcccacctatcgagaagcctggggtggggtagccccaatgtctcttacaaagaaacatgctgtttcagaacttcagctctgcattcttccacatttcccctccatgccaggagattaaaattccacactccagttactataaaactgacccatgggatttaataggcttttataaattgttgatagacctgacctccctgtcgcctcatggttccaggaaatgaccatttaaaacgaattcttcaagtaaacgggggctctctttctgcagagcagagatgttcgccatgatttttcttatactagtttgtattcatttctggctgagacgagatcttccttataataaatgggattttctattcacatggaatttttaatttctctggtttagttttcattccagacgaattgtgaaatgctgtgaataaacactcaaaacactggcgtggagcaaaggcttgtgttgtggccttcctggttttttaattttgccatttttaaaagtcaaatgtcacttttttaggagccaccaaaatgtaattgaattttgggaggctttgggtgtgtgattacaatcaacacatgctacaatccacagtcttactggtgtgttccaaatccaaggaaattcctaaaaaggctaacgatgctacagaagctgtattttcaaaggaggaaaaaagcatgcctttgtttggagtccacctgaatatattttcatttgcttgggaaggaaaaactaagtcccctgatacagaagaggtaactttagaaatgcagagggcgttgccccgggtgtttataaattgcctacatgcatagggctccctgccaggtgccacagaagaaacagagtgtttagggttcagacaagatggcaaattccagttgcatgaacatttacatagactcagaatttgagataacaaaagaccctaaaaatcactgaatcatgtcacccaattttacagaaggagacactaaatcctagaaatgtcaaagtatgtgcccaagtccttgtaattagagcatttattattttggcactgttagttgtgtgtgaggcactgtggtgggaactttatctactttatttggggtactcacagttttgtggggtgaatgccttgatccccactttacagatgggcaaacaaatgctctgagaagttaagtgaactggtcccaagtcacaaatccaataagtactgccagagccaggatttggaaccagaagtgctgactgcaaagcccagcatagactttccatgacacatcccaaacacgggctgattcttagcttggagcagacgctgggtagggaaaaccctgagcttctttggggccaggaactgggccacaccaagtaatggggcagtgggctggggacatttggaggaaggacacctgttctgaagttagggaacttctgggacctcggagggccctgtggggtacaaagaaggaaagcgaggcccagagacaccacctgagttgccttgctagtgcctgggactgtattcctggccccccaaccactacaactcctgggattccccttctccatttccttacagccaaaaaccagcgtcggagcatctgggtcctgactcagagtagagtttggacttagaacatcactaagtcaaaaggtagaaatgtccacaaggaaattataagtaacttaaaagagaaaataaggccatgtgggtgatcccacgagagcaataatggtagtgacgggaggatttatcttcttggatcatcacaaatctgtaaaaaggagactgagccatattccttgcaattccaggtccagctcagaaagatgtctcagtgagaggattggagggtgtttgatttctggctcagttctcacctaaatccagccagttttatatagcaaatgctgtgtcctgtgtgtcaaagtgataccaggcattcaaagcacagattaaaaaaaaaatcctcctaattattaatagtgtcattaatacttactgagtgctaccatgcccaggtgctgagctaagtgctcttctctgggccaggccctgggctgggcatcccagagagatcatctcaactcattcttacagcacagtcctcagggcacgggtcactagaactgtacctcagcggggtatagctaacttgcttaggatcccaagatgagagaacgtggaagctgggatttgaataagaaatgtgttcaaattccaggatctatgttgacccctaggatgaaaaattgattcattctggccgtgcttgtcaaattgtagccaagcagagagcctcagataagtgtccccagacccaagcacaggaaaaacaagtattaatatttttcttgcttgaacactttgagattttctaaaataagactttcagtggttagacaatctagtcatgccatggctttcaaaagtataccatgtattgcttacagagctcgagttagtgcgatggatgtggtttttattgttaccagcatgttttgtgcctccggggaaagaatacatgaaacctgtggtttgcctaagcatagcaaaatcagcctatttctggaggtcagcgtgtttgccctaaagaagcgatattatggcttctgtaatagttcaatcatttcctttctgctagcacctcattaacagataatagcttttatttctgattataaagacaatatctactcattgtatatgatttgaaccgttcagaaaaatacagaaacaaaaatacaaaacaccaatgcctcattgactcagctcttggtccagagtgtaatgtgattcagagcatgaattgttaatgtgggagatattccttgagaaatttcacttatcatgaaggcagctatataattttaaggctgcatttgcctagaattcagttaaaaggaaagcattaaaatagcaagggaataatcatgacctagggttgtttgtgaagacagcttccgatagtggtcccgaattgatatgttttgaagaagcagtgcctctttaaaaatacaatcacaaaggaccagcgtgtcccattctctgctcagatgtcacatgccctgctacccactgagataagagaccagggtgtcccattctctgctcagatgtcacacgccctgctacccactgagatctggatgtaatgagcttctcttaaagtagagcaagccaagtgggactcaagggtctcaccatgagtccacccagcagccaacactgtgttagtggaaatgcctagtgctcaagaatatgactggtgctgaaacgaaaggccagatggagaggtgggacagtgtggtgaataaaaacacatgttctggagctaggtggcctctgttgcaaccctcgtgaatctacttacaagctggggatttctgggcaaactaattaacctctctgggcttcagtttcttcatatgtaaaatgaaaataagaatagcacctgcttcaaaggagaagattaaaggagctatgccacataatacttgaatttaactggcatggggtgtgcactcagcatttgtgctgtggctttacatgtaacaaggtaaataatagaggtcttgaagaataggaaggaagttcattttattttagttctcctagtaatagagagatgaaagagtggttgcagcgagccactaaacccacaaccaccacatgatcttggttgggtggctcttctccaggtgataatgcagggatccaggctgttttaatcttgtatcatgtcatctggaacatatagtttacaaggctattgcagaaagggagagaaggctggagacacgtgacctcactttaaatgccatgagtgagggtggcatatgtcacttccatccatattttactggcccaaactcagtcacatagaccctccccaatgcaagaacatctgggacatagaagacacgtggatggatgctcagtgggcagtgactacatgttgtaaggagtgtgtagaattcgcttattattgccaagaaagagaacatcgataatgactttgcaataggtgactttctggaggttaggaaatctccttgtatcctggctttggggatctgtttagaaaagcatgagtgttgcatcattcaggaaatctgacatctgcgtaccctttaccaagtgacacgatttctctgctcactgcaacccccgtcttctgggttcaagtgattctcctgcctcagcctctgaaatagctgggattacaggcacccaccaccacagctggctaatttttatatttttagtagagacggggtttcaccatgttggccaggctggtctcaaactctggacctcaagtgatccacctgccttggcttcccaaagtggtgagattgaaggcctgagccacagcgcaaggcctatttagcaagctttttatgagtgaggcaaagagctatgaaggaagattatacactttttttttttttttcaagaaaagtatttccaggtatccatctgtggccaatcttcattaacccagtgcttgcaattactgtgccccctacagctaggaatacgaaacctaaaacatatgtactgaaggttattgatgaccatgcatcgtcaaagaatggttccatttcccatggtaggttactaaggtagtgtaatttggctttacattttaagttaagcgctaattgaaaaatctgttttattgtttgaggtgttaatgacaagacagttaacccttccttatctgggcttgcacatgaccagggtccacaggcccgtatcagacaaagatgaatggagaattattcatgaaatatccaatggattgaccacactagattggtctgtctttcccactaaaactcttgaaggaaaggtccagatcaagcctatatgttccttgccatatgcgtagcacctaagccaatgtcaggcatgagatacgtattttaaaatgttagccagccgtggtggctcacgcctgtaatcccggcactttgggaggctgaggtgggtggatcacatgaggccaggagtttgagattagcctggccaacatggtgaaaccccgcttctactaaaattacaaaaattatccaggcgtggtgatgcacgcctgtagtcccagctacttgggtggctgaggcacaagaatcacttgaacctgggaggtggagcttgcagtgagttgagatggactccagcctgggcgacagagcgagactctgtcttaaaaaaaaaaaaaaaaagataactattaaaatgttattattgaataacaaagtttaaaaataacggctgatttaattaactgatgtccccaagaattggaaaaagcctgattctacctgtaaatgtgcatcttctcttgtgttctaaatgcctcccttcctcctacttggcatgaaccaaactcatcagcttcatgtgctagtctggcctcttctaaagcatcactcaagttgatctgtcccttgtcttaattattaaggtatttcctacctggtacagagatgtattgacttcatggccattcaacaggtgtttgacggtttgactgcatcccctgcctacctgtatgctggctgtccagctcaggcctgcaacaggaggagcctagaatgcctagcagctttggacagtgagtgtctgaagacaagcttaaaccatttccatctctcttaatatgtgaccccacccaggaattcaaagcagcggccgcctatggtcagtggtgggttctcttgagtgccccacgttggtggtgggtgggagtctataaatcccagctctcgctcatcctggtggtagtgtgttgctgtatcagatcataacacaacaaatatttgttatattagagttgtaactggaaaaactttctgtgtttaacagggtttatattcatacggttttctcaaactaaattcctgctcatttattaatcccacaaacatcagcagagaagttactgtgtgcacaggcctttgtcatggactgtagatggccttccccatcactgcccctttgagtctcagccatgccacaccagggttctctgcaaactctcatcagggccttctcctgagcttccctagacccccaggtttttgggcgtcccctctcattcctgccctgtttggatggggacccagctggggctgtctctgacctgggtgattcctgtccaggcaaaggctctgggtggctggaggtgaggccctgagctggggagctgtctggatctgaattcctcccgaagccggctctgaacaaggatttgattagaatgcaagtagttgatggggaaggcggtcccaggaaacccctaggaaagtggggaggtgaggcaagggagggaggcaacaatatggagtgtattatcaataatttaccccatggacagctagagcttacccctgccgggaagctgactatcccacgaggggtggaggtgtgggaggtgcagggcaggtgttcacactcgctctcatcagttgtagattgagggctactggggtctgggaactgattcccagcatttcaggcctctccctgggaaaagctcattccaagagccagaggaaccctcaggcaaggagacggggatgctggctgtgtggagtccagcaggctgtcgtggaagaggggacacgagcagcacctgcagtgtctactccagggccgaggccaggttagcacagtgagacactgacggacacagtgtgtcagagcagggctggcacgtggcaccggatggcgctgcttgaaattggccaattgcctgctaccccaaggcaactggaaaatcacatgcggctttgccagcaactcctgcaacctgtagttttattcaggacagcagatgctatcaagggtgctgtgccctttgctgatgcagttgatgtaggaagtttgcttgttttggtgatggctgatgatatctaagaattgtagcttcaagtatgctatagtggtcagaaaggaatttaaacaattatgtgtgtgtgtgtgtatgtgtgtgtgtatgcatttagttattacaaagggttccttgtttaaaaagctatatatactgttgcactaagaaatgcttgtattgtgaagagcaaatagatttgggtaaatggatgttttagcacagtaaatggcattattatttaaacacatagggaactctgaatttcagtagaataatggtggttgcctgcatccaaatctcttaccataacttaaaaaaatttacccaaatcaacaaatagagcaaataaaaccattgtttacacaagccctcaggattactaagagacaaaattctacagacttcaaatttcctgtaagtagtgagagaagtatccaggtccagccaggcaggctccggagcccgcccctgtctagagcattgggcggggaccacagaggacaagtggagaagggcaggagtgtgcatagcccggggtgatgcagcccagatcacattacccctggaaggacaggccccatcctgagtgggaataccagacagtgtgagactggaggctacagccgtaggaaaggcgaggttactgggagagaggagggaaactaggaagggcactgccccttggagacttggtgatatccagaaagaaggcaaaaagaataaaataaagggtccttcagagatcaaagaaaaccgcaaaatcagacatgcttcccctcttccagagtaagcacaataaagaaattacacttcactctatcaacggtagagggcgcatctgaatcaagaaacctggctaaccacccacacgctgtcccctgcctacatcaactctcactcacgatccagtaaagaaaatagatgacaaaaggagcagaaagtggcagacaacgtgcaagcaaagctgcaatcagaagaaacgagtttgtgaatctaagcatttcagctagtcaatgttctcacccctctacatacacacacacacacacacacacacaccagagcaaaagaaaactaatgacattccaccactaattaaatgtcctaacataagaactttcatatgctaaaaaacccaacctttaataaaaaaatcagaactaaaatgggcaaaacccaggatgaagtgaaatgagagttgactgaactccggagaggaaatggggaaattcagtttgcagatgcttttgtgctgccaggcaggacatcctttcagtggacagtagatggacaagaactgttgccttttcccatccacaggcctatgttttctaaaccccagcccaaggcaagcatttcttatccataagcgtactggctatttcagtggggaacattgtgcaaggccaatgttggctatcatttttacttgccaagttctctattatatgagactaggaaatacccaaatactttcccagggaagatcaagttgagtggattaaactttccaaggagagcttcattctccttggtaatatgtcaaactttcagagataaacttttcagagatgttttcaaattgtaatgaatgactaccataaatgatgccgtattttatactttaaaaagtaattttcatacattatattcatcattaaagttgtatatatgtcaaagtaacacatgtgatagtttcttccctgcctctgtgtgaccacaagcagcttagaaatgcttcgccttggtttatacatgtgaaaaatgagaatgggaatggcttccccctctgtgagatttccagtgcattgctaacttcagtctgtgggacagattgtatttttctaaacatagccacaatgtcatcacccatcccacaccttctcctaggcacctccttatcaagaggtaaagttgaatgcctgtctcttgagtctgagtgggtttgtgtctcacttgtacccaatagaatgcagcagaaataatactgcattacttctgaggataatttggaaagaaaaagatagtgcaatttccaccttgctgtctggtacattcttgctggagtgctgagctgccatgcaagcagttagactgttctgaggctaccatgctatgaggaaacccaaactagccccgggcaaacagatcacatgacaaagccctgaagctacatgaagaaagagagagataccgtagcagtctccagctgttccagccataccttcccgttccccacccccacacactctgccttttgttccagttccagttaccatctggctgcaaccacatttgagactctgagccagaacaacccagccaagcccttcctgaattccagacactcagaaaccatggcaataataaaatgattattgttttaagccactgagtcttgcggtgactagttatatagcaatagataatgaggatgcatgaagcgtgaagatgcatgaagccatcatttctagggaaagtgtagtgactatgcctaataccttttgcggtagtgctgttttggataatttttatagcggaagttgataggacagaacatgtctctttggggaagaattatattcctctctagatttagcttacatgctaacctttccagtggaaaagaattgagttattttccagtgattttctgtttttgtacttgcaaagctttatgtatctattgcttttggtgaaagtaaatgataggataggttactggagagctatttattttgtttctggatgggataaagctaaaaggacatagggactaaaaatgtggctgctggtctcaaggatttctaatgaaacccaacattgggtagctctcaagttaattctatggtgagcaaacatatttaacattctaggccataataaagacaaatgactgtctgggcacagtggctcatacctgtaatcccagcactttgggaggccgaggcaggcagatcacaaggtcaggagttcgagaccagcctggccaacatggtgacactccatctctactaaaaaaatacaaaaattagctgggcatggtggcgtgcagctgtaatcctagctacttgggaagctgaggcaggagaattgcttgaacccaggaggcagaggttgcagtgagctgagatcgcaccagtgcactcctgcctgggcgacagagcaagactccatcttaaaaaaaaaaaaaaaaaaaaaaaagagagagagagagagaaatgacctcaaatgcggggctagagggagaagattttattcctgatggcaaaagtgtagtgattaatgtcatggagtcagatggtttgaatcctggctccctcacttactggctgtgtgaccacaggcaagtaaatttatctctcatgcctttgttgcctcatctgttgttatgaaggttatggcaaggattggatgaaataatagacataaatggcttaatacaatgtcaagcatatactgagtgctcaataagtggtagctagtgctatcattatgttatgctttctggattttgtattttaagctccaggtccagagacatagatctagtaaggggaggatagacagttcaggtattaaactgcttgactcaagcatgtgcttactggcaaccatgttactaccctatgcattacacaagacaatctcagatctactccatctatcccaggtgatggtcttttccaaatagaggaagacttcctctatcagtaatgtaaagtactacacccctccctaacttgtatttccaaataagttattgtgtttttattgtagaatttaacatttagattaaaaatacttagtgcgatctcagcaaactaccatggaaaggtaaccacttgaatctgacaaagggtatgtgcaagccatgttgaatggtgaaatacttaatgctttcactctgatgtatggaataacacaagcgtgccctatcactcttattcactgtcaccttatagcatctatcactctgtcatctgtattcaacaatatactggtagtcttaccaggacactaaggcaagaaaaagaaagaaatgttattaaaattagaaaataagaattggccaggtgcattgcctcatgcctgtaatcccagcactttggggggctgaggcaggcagatcacttaaagtcaggagttcaagactagcctggccaacatggcgaaatcctgtctctgccaaaaaaaaaaaaaaaaacaactagctaggcatggtggcaggcacctgtaatcccagttacttggaaggctgaggcaggagaatcacctgatcccagtagacagaggttgcagtgggctgggatggcaccactgcactccagcctgggcaacaaagcaagactttgtctcgaaaaaaaaaaaaaaaattaaaattgccattactcaggagttaatatactagtaacaagtagaaaattaaatagaaaatgtgatctacagtaccatacaaaaaaaaccttaacaatagatatgcaagaacaccacactaaaactacaaaacattgagagaaattaaagaagacctaaatagatagaaggacataccatgttcatggattgagatattttaaagatgtcatttatccccaaagtgatctacggactcattaaaatttcaaataagtcctagcagaattattttctgtttaaattggcaagttaattccaaactgtaggtgaaactgaaaaataattataaaattcaaagccatatttaagaacaacagcaaatctgtagctcttacattaccaattattaagacatgctataaagctacataatgaagactgtggcatcagaacaaggatagacaaataggtaaatggaacagaagtgagagttcagagacagagctacaagataatgcagtatcttggcttacaacaaaggctacactgcaattaagcgggtgtggaggcgggagaagagtcttttccacagatggcgctagtcagttgatattcctgaggaaaaaaataaaacttgattcctatgccatacacaaaaatgattttatgatggatcataggcttaaatgttaaaactaaaacaattaaccttctagaaaaaatacaagagaaatatcttcgtgaacttgggatatgcgaagattttttaaaataatacttttaacttaagatgtgtgcactttactgtatgttaattatacttcaatagaatttcctctcccttgtcttttgttatgtgacactcttaattttcttcctagtcctttatgatttctctatcttgcctagtttcttttattttgtacaagattctttctgtggtttacttactttctcttgctgcagttggtatcttgggcattttacctatttgtagctttagctgcctgctccctgtaggtggctcctaatcttataactgttgttccaatctgcctcctcccatggggtcgtaggactctcagggacatccaactattgcctggttccctgccatgtgcttcagtcccctctatgcatccccatgggttgttgttcagtctgtgctttaatatttttgatgaggagaaaatcacccagtcccaaagtgctagccagagattcctcacctcgagttgcaatttgtcttcctctaatttctctcctttggttctcctcttatctgtcactgagcaagtctaattccactcacatgacagaggcttccctgctttttcttttctccaagtcaatcatccaagactccttcaaacatcttttcctaaacatggtcacatatttcatttctagctacttcttgacgggccctaattttatcacgtttttatcaaaatgtggcacccagaattgaacagaaggcttgaaggtgatctggcctctatagaccatcatttccctcgttgcagatgagttgttttctgaatatagacttattcatttgtctctagtaattcttcaactgccttttggatttctcaatctggatctccctagaaacctcaatttattcaaaaatgaaataatcatacacccaccgacaccagcaactgccccagtcttacaaggctagcaagtcaggttgcctgcttcccactcagataacttgatctctagccttattaattagggggcagctattactccacttggctttcattctctatttgtgtatgtgggtttagggaaggggactttttatcctgatacagaatatccatttattcctgttaatttttcaactaatgttggatttttcaagttgggcttaacttatctaaatctaggataagctgggctctgtggcttgcacttgtagtcctatctactctggaggctgaggtaggaggatgacatgagtccaggaggagttcaaggccagcctgggcaacatagggttaccccagcagtaaaaaaattaataaaaatagaataatcatccacttaccccaaccaattccccctcccaacttccttatcctttgggtggccttatctggcccttcttcatgtctgtcaccttctttcttagttcaagcccatattccttagttcaggtctctcttacttgccctaaatggtccttccagcctccagcacttcaccccaactctgagatggtcactagctcccataggtttgcattgtaaaatggaaacccttccctttgtccagaccatgacctggcctgcctttccatgtgaatcctcaatatgccccaagggctaagcagtgttctaatggttgtagcttggcacagctgctttaaaccaagtggttctgtctaaactaaaatgcctttccccatactccccagccaaaactacactcatcttctgcatctctttcagatggcccacaaagaaaaacaggacttcatgtgtgttcctgtaatgtatagcttagaccttgaacaaaatcagccagtggctttgaaattgaataaacaaatgaattacttgtcccatttctttaattggaaaaatagaattagaaatgattggaaaattatcacagatatatatgtatttctaaaactactggtcatttctaaagataagttttccaaaaaagtgaatgaatttatttgagaaaatgactaaaatacaattctgtggatgttatttaatttcctcttacatatttaagaagacaccaaagaatataatttgggagttacagtgctaaggcttagataatttaaggtcaacaaaattcttagcttgatctttgaaagaatacctgatccaccaaagaggagatgtgccccctgcctcagatattattatgtggaagtgaggaaagcttcataaaattacagtaacatgacttctctagggaaaacagagatcatcagttgaggaaagttaactaagaagttcattttaaagtaatctaaattttcttcattacacaaatgtctttggaaagggaatgaaaaatataacaaatataaatccttatttttcataggaactttaatttctttttccaaagataaattattctttgaaataagtattcctagaactgttaacaggaggcattttgaggaaatgctcatattctcatgcaaactcagcactggggttgtcttagtgcaactagcaaggctttctttgcctgtatcgtgtccacttcaggcaacaggtaaggaataaagtcatctaaacttacctaaaatgttcatgttttagaattacccataattattatcttcattcctttaataatgttgaaaaggaaatgtgtattttttccttccctcccccatccagctttttctcaggttgtttccatggttgggggaagaggaaggacaagtgggactccttccagggacatggccagagcagttgacaaggccaagtggacagtatgagctgaaagaaagaaattcttctttgtggacagaggaactgcctgtgaaggtcttcagaggcaaattctaccacagcggaaattccacttccagctggcgtggtttgccttggctttttagggtctacctgtctgtaatggtcaccctcatcaatgcacttaattcccatttttaacagcaaaaatatacatttctaaaagatggcgaaaggaagatattcaagtatataacatgctttaccttaaccaaatattgactgaggcctcatagtgtcatttctcgtgaacatttaaacaagagcagaatccacccgggtcatcagagggtatcatgtgcctgaaacaaaatgtcaaagcagtggtaataggatgtaatgagtgatgtgtgttgtgagaaagacacttgaactaagatctggaaagtgagggaagcaaagctcacaggagcaaggggtgcctgccattgaggacttagcgcacacatggggaggtgaggcaagagccaccagaggggctaaaggggggacagtgatgacaaaccaaagatgatttggtgattgacaagccaaagaagactcaggtttgccactgaccagcacatagcgttaagcaggttacctcacctcttccagctacaaaatgagcatattctattaccccttcattggctgtcggggtgatttgagggaggagggggctcagcatagtgcctggcatggaatcacttctgaaaacctgctagcaattgcctattatgttttgaggtggatcttaaaagtttggcaggatggtaacaggagatggctgcggagggcaaggtattttaggctaagcagccactgtgtgtgtgtgtgtgtgtgtgtgtgtgtgtctggtgtgttcagaatatagcattgtgtttgtgtgtatgtgttcagaatacagcaaatacagcagcccagccaaggggtattgatgacctgtaaggctttgggaattattccatcaggcagcactgtccaatagaaatataacatgagttgcatatgtaatttaaaattttttgtagtcacattttagaaagtcaaaagcaataggtaaaattaattttaataagatatcgtatttaattcaatatttcaacatatgatcaatatgaaaatttattactgaagcatttaaaatttttttgtattaagtcttcaaaacctggagcatattttctacttacaaagcattcctattcagacttgccacatttcaggtgctcgattgccacacagggcccgtggctgctatattggatggctcagccacagaggggctttcctgtgataatagcatggttttccttgaatgttagtctttctctctctcgtaccccagagagggagatggcaatgcctttctctagtacaattaatttaaagaaaaaaaaggaaaggaaaaagggagggagaaaagaagtactccagggcactatcttcacagctggcctaatcctgaggttttcacaaatgaaaactcaaagggttttgggagatgctggaacatactttgacccttttagattatactagcagagatgctctagaaatcttgcacaaagaaacttattttactttgagtaactccaaattttccaggttattaggattacagaacaatgtttttaacactttctaaggttgacaattcatcgttttgtaggaaaagctgtggggaaagactggagaagcctagatttgggttccccatggtagctactgacgcattgctggggttgctagatagggaagtacagggaattggaatgagaaagctcatagctgggtgagtaaattcttagcctgagccaacaccagagatgtggtccagtcatgaagataacacaggcaggattcagtacctaacaaaaatcaatcaaattggtcactgaatcttttcatctgtgaagcttagatacactaaggcaggatgaactgaaccaattttacttcctttaagagaagatcagggaaaataatatacccaagatcacaaggatccaaagaataatgcatctatagtcaacatgtacagaatagaaaagaaaagaaaggctttagtgagagatgaactccaccagtagcagatttcaaaatggcacccagcaagtggcctgcatgtgcaaatcttcaaaaaaagattcagtgggctgggtgcagtagctcacgtctgtaatcccagcactttgggaggccacggcgggcagatcacctgaggtcaagagttcgagcccagcctggccaacatggcgaaaccccatctctactaaaaatacaaaaattagccaggtgaggtggcgggaggcggaggcaggagaatcacttgaacccaggaggtggaggttgccttgagccaaaattgcaccactgcactccagcctaagcaacagggtgagaccctgtatccaaaaaaaaaaaaaaaaaaaaaaaagatacagtgatactaggtaatgatgaataacgttcatatgaaccttctagatgatgctatcaaaatatgtggaaaaataagcaactacttcagtttctagagttgtgactactggattaagaaaaattaaatctagttgtatttcattttcttcaacctgttattaccttgtaggttttaatttataaatttctttataaggacttcagggtttctatgagaacagcgactcaggatttctcacaacgcctcgcacctactagatgcttactccgcatttggttaattcatgaataattctgatcaagacaatccccttcataaatttggctttcctccatagaaaaattaaattaaaatttaagacaatttagaatccttaaaggtagaaacacttcagttgtctttagagaaactctagtttgttgagaaaccaatgtaagttttaaaagaatttgcatttctcttaggaacacaaccctgttaaagttcaataacccatttaaaacacaggcactttgctgaggaaatgctcttgtgtacacatgcggtgacactggcccaggaaggtcaggacagcatcccaagttgttccagctgcttaacccggactcgcagggaagtctcagtcagtctgtttctgtttttaatatgtcattatatttcttcttacggaaaagcaccatttgtaagtggctatagtgtttttgtttctgtagtaatatcttagtttctgtaagatgtcgtagcatatgtcatacatattcagtgcaaattcagttttgtgtctattttttagattgtttgggtttggctgtttattgtagttttcaagtaaaaacccctttggaagttgaccagtagcattttgcctggtgagttttttttcccctcaggtcctcagaaaatttagttttaaatacttgtggatgctactgaagcaatattaatgaaaattggattttttattgccctctattttgcccgtgagataagggtgtcagagatctaaaacaatacagtctgatgttagaaggggttctaggctggaaaacagcctaactattgagatcctgcacgtgacagcaaatccccttctctataagaccaaacaaacatttttttccgcctccttagagtgccattgtgtcaaatccaaattggaaatatgtcctagaatgctaaaactcagtcaacaaatgttaaaatgcacacacctaccccatgcatcatgggcaaaggaaaaaaagaccagcacccccaaacaacacacactgaagtaacatcactaagctccagaagctctatgtttaagggtccacagtgtcatcatttaaggatttttcaaatagacaaaatggcacatgaaaatatgaaataaagggctgggcgcagtggctcagcctataatcttgcagtgagccgaggttgcaccattgcattccagcctgggcgacagaatgaagctgtctaaaaaaaaagaaagaagagaagagaaagaaagagaagagaaggaagaaaagagcaaagaaaaaaaagaaaagaaaagaaaagtaggttagggcaaagtgtaacacacacaggcacgtacacatccaggaggaatgtatataggagtttgaccttttctgttttgtaaaatgaaggatttggtccatagtaaagattttcaaaatgggcctctatatggacttattctcaggaattcacatatcctccttttggaatgtctgaaatccagtatgtttttatatcaaggataacatttactaattaatcaaattacattctggactaactacagcaatgtttttcaagctgtaggtcatgatcccccagtgaactgtggttcattaaggggtgaagttgggtatatccagcgttgttttaaataaaagtgaagaaaatggaaaatattagagtgtacggttggtagtaacagttaagtattgttctacaaaatgtttgtttctgttttgtatgcatatgcctgggtatggatcatgatgtgaaatatatttattaccatggatggatggtcaaacgtgtttgaaagctatgagtcaatagattcctgttctcgaccttcagtgcacattggaatcacgcagggagcttcaaaaatagggttcccatccccaaattgatttgggatgtactctgggcttggagcttgcttaaagcttcacaggtgtgcagccaggttggagaatcccaaagaattgagccttgggaccaagttctgccaagtaatttcagtgtctgcctctgagtttgagtttatttaatttgccttggggccaaatcatcccataaactgagattgttgcaaggtatgaagatggtcaggggagacttcacacagagtcaatgttttttgttttttgttttccccaaagtgaaggccaaatgcagtgtaatgggggaggatgaatgaaagctgcccagtagttcagatagagaaatgtagtgggagaattcaaagaaagagtgaaagagattggaataatttgaattgtgtgagcaattccagctgccattccactcagtaagtgagtgtcccagcatcagcataacgcagggcactggagtctgctgttcccccaggtggtctcagtttataggtgcttatcactagtgtgagcctctgcacacagcaaattagctgtcagggtaatttttgacttgttctctcatgtaagcccttcctctcttagaatatgcaggcccaccgtatttatgatgcaagagtgacttagtttcaggaaaacattatcccttgcattaattgagttacttttaattatattcatttacattcttgttcttatataatttacaattgtgcttggttttataactatgtaaaagcaagaacataggccatttacacctagttattttatttgcacatacttatttaataccataatataaaccatgcaacaggctccctttactctgtgtgatttatgaagctcaccctgaatacagtggggcagtacattgaatccaagacctacctattagtaaagattagaagacattgtgaagtgatgtcaacgtagcttaatgtttattgggatgattttgagtagtcctatctgtgtgtgaagcaggggttcagaggaaaatctggattcaggaggaaaatctggattaagaaggaaagtgggatttaaatgattcctgaaaaatgatgatgatcactaacattgacggtggtggcagttcacattgtttgagcatttactaaataatctgcaatggaccaatgctttctatggattattctacttaatcttttttttttttttttttttgagatggagccttgctctgttgcccaggttggcggtgtctcagctcactgcaacctccgcctgccaggttcacaccattctcctgcctcagcctcctgagtagctgggactacaggcacctgccaccacgcccggctaattttttgtattttcagtagagatggggtttcactgtgttagccaggatggccttgatctcctgacctcgtgatctgcctgccttggcctcccgaagtgctgggattacaggtgtgagccaccacgcccggcctattctacttaatctttagagcaatgctttgaaatataataaatgctattacaattaccctatttttttatataagaacccaggttaagtaatttacctgagcaactcatctgggactgaagcccaagtatgttgcatcccagcccaagagctgaatcttctcaaggaagaggagagggacagggaggatattctacaccagaaagctaacatggacccaggcatgaaggaagggatgtgtgtgcatctgtgtgcgagatttccaggggaggagatggagggaaagtcagagtccagttatagagcctgacagaggagccaagactatgaagtattaggaaagcagtgggaaaaaaagaatgagataaccttcttataccgatgttgggagtttgataggacatcctgaggatagaacaagcaggagagtggagcacatgagaaacatatttagaaaagaaacacatatacgtgtgtgtgtgcacgtgtgtgcatgtgtgtttgtgtgtgtgcgtgtaataggatattggaatgcacagaagcaatctggaaagatataatttaaattataaaaatgcccacttctgccaagaatataggagttaatggtgatggtcaaagggaacttgagctttgatctaatatttgcgttttcaagcaaggtgactgcattcatgcatgtacttaggtaattttgaaaaggctaggatactgattcaaacagttaaaaatgaaatataggataatatagtaatttttttttttttgaaatggagtctcactctgtcacccaggctgaagtgcagcagcataatctctgctaactgcaacttcggcctcctaggctcaagcaatcctcccacctcagcctccccagtaggtgggaccataggcgtgtgtcgctatgcctggctaattttttgtatttttggtagagacgggatttcaccatgttgcccaggctggtctcaaactcctgagcccaagcgatccacccacctctgccttccaaagtgctgggattatagaggccagtcactgtgcctggagatataggaatttcttattctgattagtcccatctccagaatcctagactagaagatttcgggatcctttttgtaggaagcgatgtgatgcaagggataagggaaggaaatgaattgtcacttaactggtggggaagacaggatgcttgttaattagttccattcatgaaagaccatttagagtttttaaaatctgagcattggcacagggatttagagggcattctggtaaagaaatctccctcctcggtttcctggtccagaggtggaggaccaggaatgggaaggaaaggccatcactgtgttctcatttcgcaatgtctcctcccagagccagactaggaagcaagtcctctgtgtggttgttcattgtgtttttaatatacatacaaaaccctgaatggtcaatttttgtgttgtagatggagacgagagatctggacttctgaacatctaccggaaaagataaaatgtgcaagcccttcagaacgctggggaggttgggctgaactgcagtgggagaggagaagagatgctggcgtgaaggggtacgtagcagcgagaccataaacccagtgtgcgccaccccagcgttttcttcatttccaagctcatcagtgtgattgggaatatcatgtgctatagttgtgatatgtggtcgtggaagggactttgctccgacagagcaacagggaggatgttttccagctgcctgagggattctgtccatgatacactggcagcagggccacatcaagatcaggacaagttaggagcccacgagcataaagggaaaccattcacattttcagagcactcatcatgggccaagcacagctttaagcactttaatgggttagttcattcaattatcacaacaccaccacgaggtgggcactgctgttgccccgtctgagggatgacaccactgccgagtacaaagaacctggcaataactgaaagaggacatggcagtaatgattctacttctctttcttcagttcccaccaccttgcttcctgttctccactttttgtagttttttttataatagaattataaatcttcacattgaaaggaaattgcattgatgggatttcagtataggccactatggcagatcatatttttcaacatgggtcacagtcatggctcctccaaaaccttgctactcctccatcaagtggagaggtctattttccctctccttgaatctgagcaggacacagtgactgccttgacataaagaatgtggcaaagtgatgtcgagtgacatcaaagtcttgattagcaaaggtgacggggcttccacgtagctctctaaatcccttaggatacatgtccttgagacccagccaccatgtttctgggaagccaggccctgcagagaggccacatgtaggtgctccagttgacagccccactgacatgggacttagaaggctggctccagcccccagcctttgagctgtccccactgatgctaaatcgagcagagataagctgtccctgctaaaccatccctgctgatccctgctcctatagcagattcatgagcaaaataaacattgttgttttcagctatttcatttaaacccacagcaacactgtttgaagtgtaaaatatcattttgcttgtttacaagtaagaaaacagaagttgaatgagatgaactgacttacctaaggccacacaactattgaatgtgttgctggagtttcaacccagagctgcctgatttcaagcttgtgaggttcaccactgctctaactacacattctttctgggctgggagctgggccttcgctgccctgtagacacaactgctctcagagaaagcaaacccttgcagagtaagagcaataagagagaaaaatgttagagaactatttctgcacaatatgttgttgctctatttcttaatttggaccctggttgggtgcctccctttctgacttaagtgtagagttctctcaggaagctgtctaccttccctccatgaatttagatcctgtggtatctgctcatattacacaatattcttttccttatcatgtaaaataatcatcaagtaattctttattttattttattttattattattattttttgaaatggagttcttgtttgtttgtttgagacagagtcttgctctgtcacccaggctggagtgcagtggcgcaatgtcggctcactgcaatctctgcctttcgggttcacgccattctcctgcctcagcctcccgagtagctgggactacaggcccccaccaccacgcccggctaatttttttgtatttttagtagagatggggtttcactatgttagccagcatggtctcaatctcctgacctcgtgatccgcccgcctcggcctcccaaagtgctgggattacaggcgtgagccaccgcgcccggcatcattatgcgattctgtgatcaatgtctctatccctagttttatttcgggaaggcccgggattggtctgtctttcctattcttcacctcttttcttctagcaaagacccttacctgagcagatacctaataaatgcatgttaaataaacaccaaagagcattagatgtgaattttcttgataataatgatgacagagtaaggaagtgcatagttccaggtataaatactgaagtcttatcatgatgttgtaggtttgtcttttgaggccaaagatttctcacttcctctgtccttcctgttagataaaacatccctgtgtttgactttcataaataaataacttcaataaaatgcagttgtaaaataaacaataataggaactgccacaggactctgagatacgatatttcattaggttatccgagcaaaaaatattttcaagaggggaaaagccaatatataacattggagaactgatgaccacatcatccgttgtcacatttaatcatcacgacagccctatacaggtgggattgttattattctcattttacagatgggaaaactgagtctcatgaggttaggtcacttgccctacatcacccagttaggcagtatcaaggcggaatttggagcaggccgggtgacttcactgggccctgtcccgagcaccccgtgcttaggtgacctacatgcttggcagaaagagctgcccctaccaggtatggccaggccaggtgtggtggctcatgtctgtaatctcagccctttgggaggccaaggcaggaggattgcttgaggacaggagttcaagatcagcttgggcactatctctacaaaaagtttctttaaaaaaaaaaaaaaaaagtatacctagagttcctggggcttggcctccctcccttccccttgccacagtgtgactaaaggtctggagtgaggctgtgttatagaaaggcaggctggagggatgacatcactgaagaattccttggcaagcagtcagtcagccacctttgggtagtccctactttcacctgggtcgctagggttggttaatttttaataccaactgagtgacccatccccttctccaccttgactgagtcctgaaggccccctcaaaagctaggttttagtgccctatttcatggtacaccaaggagtgctctggcaccatctagagcaagccctagtcatctgcatacctgagcgaagtcttccagcccctgctggaccctgttggaaacaatgtatcctctcttggacacagtccatgccttagacctatactccaaggagcacaacctgaccagcctctcccactagacccctcttttatcttctcttgttctcgggcttctcctgccctcagtgcaatagaacttcattaactaaatacaattaaccgagaatgctttattgttcctgttgttctacctgctcactgattagtgaaaaaggccagcactgccatctgtgggctgagaattgtaaagtgacttaatgaagatgaaatgtattcctttctcttcattctcttttacctgtctattttcctcgattctaccctgttctttcaaccctagcagatgcagcttagaagcctgataataataaggataagcaagtcttgctggaaaataactagcatttattgaaagcttgttgtgtgcaaaaagaacaaagctggaggcatccactacctgagttaaaactatactacaaggctacagtaaccaaaacagcatgatactggtacaaaaacagacacatagaccaaaagaacagaatagagatctcagaaataagaccacacatctacaaacatctgatttttgacaaacctgacaaaaacaagcaatggggaaaggattccttatttaataaacggtactaggaaaactggctaggcatatgcagaaaattgaaactggaccccttccttataccttacacaaaaatcaactcaagatggattaaagacttaaatgtaaaactcaaaactaaaaatcagatctttgttctttttgctccagattgtcttacctgtacagactcttttttggttccatgtgaattttaaagtagttattttttaattctgtgaagaatgtcaatggtagtttaatgggaatagcattgaatctataaattgctttgggcagtatggccattttcacaatattgattcttcctatccttgagcatgggatgtttttccatttgtttgagtcatctctgatttccttgagcagtggtttgtagttctccttgaagaggcccttcacttctcttgttagctgtattcctaggtattttattctctttatagcaattgtgaatgggagttcattcatgatttggctctctgcttgtctattgttggtgtatagcaatgcttgcgattttcccacattgattttgcatcctgagactttgctgaagttgcttatcagcttaagaggcttttgggctgagacaatgtggttttctagatataggatcatgtcatctgcaaacaaaggcaatttgacttcctctcttcctatttgaattccctttttatctttctcttgcctgactgccctggccagaacttccaatactatgttgaataggagtggtgaaagagggcatccttatcttgtgctagttttcaaggggaatgcatccagcttttgtccattcagtgtgatattaactgtaggtttgtcataaatggctcttattattttgaagtatgttccatcaatacctagtttattgagagtttttaacataaagggatgtggagttctattggatgccttttctacatctattgagataatcatgtggtttttatctttagttctgtttatatgatgaattacctttattgatttgcatatatcaaaccagccttgcatcccagggttgaagctgacttgatcgtggtgaataagctttttgatgtgctgctggatttggtttgccagtattttattgaggatttttgtatcaatattcatcagggatattggcctgaagttttatttttttgttgtatctctgccaggttttggtatcaggattatgctggcctcataaaatgggttagggagaagtccctccttttcaattgtttggaatagtttcagaagaaatggtaccagctccactttgtacctctggtagaactcagcggtaaatccatgtgggttttttttgttttgttttgctgttgttgttgttgtttgttttgttttgtttttggttggtaggctatttatgactccctcaaaatttcagaacttgttattggtctattcagggattcaacttcttcctggttcagtcttgggagggtctttgtgtccagtaatttatccatttctgctagattttctagtttatttaggtaggcactattcttatccttattttacagatgagaaaactgaagcactgagaagtcaagttacctgtgtgtcatggcgtctggcacattcaagtgttcagtgagtgttagttactatttattacaatgagacttagctttggtcaaaaattgggatgcgggtatttatatgggcagggatgccctgaagcacaatgagggagtagggagtggcatacggagggcaaagaggccatacagtctgtgacatgagcaggttaccactgtgggcaccagggctcaatcccaccatcactgcgacagactgtgtaggattcatcttcgaatagtccaactatgggactcagaagttaggatattcctgaaagaagttatagggaccttattttttttctgagatgaagtctcactctgtcacccaggctggagtgcagtggtgcgatctcggctcactgcaacctccacctcctgggttcaagcagttctcctacctcagcctcccaggtagctgggattacaggcacgcaccaccacacccagctaatttttgtatttttagtagagacagggtttcgccacgttggccaggctggtctcaaactcttgatctcagatgatctgcccgccttagcctcccaaagtgctgggattacaggcatgagccactgcgcctggcccaagttacaaggacttttttttttttaattattatactttaagttctggggtacatgtgcagaacatgaaggtttgttacataggtatacatgtgccatggtggtttgctgcacccatcaacccgtcatctacattaggaatttctcctaatgctatccctcccccagcccccaacctccaacaggccacagtgtgtgatgctcccctatcctgtgtctatgtgttctcattgttcagctcccacttatgagtgagaacatgcagtgtttggttttctgtccttgtgatagtttgctgagaatgatggtttccatcttcatccatgtccctgcaaaggacatgaactcatccttctttatggctgcatagtattctatggtgtatatgtgcaccacattttctttatccagtctatcattgataggcatttgggttggttccaagtctttgctattgtgaacagtgctgcaataaatgtgagtgtgcatgtgtctttatggtagaatgatttctaatcctttgggtatatacccagtaatgggattgctgggtcaaatggtatttctagttctagttccttgaggaatcgccccagtgttttccacaatggttgaactagtttacactcccaccaacagtgtaaaagcgttcctatttctccacatcctctccagcatctgttgtttcctgactttttaatgatcgccattctaactggcgtgagatggactttttaaaaagcaacgatgaacatcatgattatatcctgtacgttgccacccatttttccagggaaggaaagaggagaaacctactataaactattccccctggcttcctgtacttcccctttgctctggcatcagcttttacgtgtgcaacaaaacatctccaaactcagtaggaaaactgagctgggtgtgatggctcacacctgtaaacctagcactttgggaggctgaggtgggatgattgcctgagcacagaagtttgagatcagcctgggtaacatggtgaaacctcatttctacaaaagataacaaaaattagccaggcatggtggtgtgcatctgtagtcctagctaataggcaagctaaggtgggaggattgcttgagtccaggagctcgaggctacagtgagccagcctgggcaacagagtaagatcctgtctcaaaaagaaaaagacaagaaattgataataaatatctgtttagctcatgcaaacagaggttagctgggatctggcagatctaggttgggctcagctaggtgacgctgcttcctgcacaggttcagctaggcttggcttcccactgatgtctgggttcaggccagcaacacttagcacacgctaagtccaggttggtgggcatggctacctgaggaaagctctcctgtgacaatggcaaaagtgcatgagtataagtggaagcccaagaaaccttgtaaagcttgtgcttggaatcggcacactgacatttttgtattattctattagccaaagcaagtcacatggccaaacctaagtcaagaggcagagaaatgtgttctgcctttgctggaggagtttccactgttgaccttggcttaagaccaataaggcaatctaccatgcttcctctatcttatgccaaattgggcaaacatgatgtgaaatttaagtctttgccagtgctagttttagttatcacttttggcaaaatcccaaaaccttaatgatattctaagttgttattaatgggagatgagatgatactaaaagctgcacaccctaaggctccaggaatctctttatctcagacctgagctgggaattgttactttatcttgtatgatggctttgttcaccttagaattatgaagtgtttggagatggtgagcttgttcctccacagtgacaacctgttagcacttcagcagctgcctcaaatgatcagacttggattcagcacacaccagttgcccaaacttgtcagaatgaaataaaagcagcaagtagaatgaataaattgtcagtcatattgatgtgtgtgttttcctaaattttaggagaaggttttggattctgcaaaaatgccttttctgtgcttctctcaataccttggctctctcatctggcatggatgcagtttagctggaaggagaagaggcaaagcttttatgttggttggaatttgcagccttaaatttacaggactttttccaacttagcatggaaaagacttgcagttttatgctttttgtgagttataagtcataaagcatatgctaggggtggcatcactgttgtgttcttggccatctaaagaaggtctgcggaagaaacctaagccttaaatgattaaatgtctttccaaacactcataagttatttatactgtgtccttgcattggctaagcaagcaagcaaatgaacccagacgttgatgctagtgtcttacagtgcattctaattaaactatgaatgaaatcatatgccttatgcgtgccgttaagatgcctgcatgcttagtggcttgcttctgtttgtataaattcacaggccacacctggcagtcacaggccgcccctctcctccctgagcctggtccccagcagggccagagaggccgccatggcccagtaggagtcaggggaaggggagtcgggtgaaggaaagctgagaataggatcttgtgtagacacaggctgtggcatggccctgctttgaccatctagctgggctgtagggcctgttggggcctggagtggcctcagctcgggtctgccatgagctctttccactccccgaaggccctgtataagtaatgtcattttctatttgcacagcaaaatcagggacacagttttctaaagcacgaggtgcctcccctcccccagtccaatggatggtctaccctggttggtgggcccctgtttgtgtcagagacagaacactccgcagggttccggttagctgtccacaggtcactggcaagtggaaacagagcagcagagccctctggagccacggaaggcctgctgctcgccacgcaatatctactcagctgctgctggccccctgggggtggcattgctagtgatgtatagaatcctgggactagtgccagcgaccctagggataccctgggtgatctggacatgcactgttatggtggcctttatggtcaggagacgacatgcagtgaaaagaagggcagagccggcctaaagggatgcggtccagggcgtggtccaaggaaaggccagagccaggatgcagtcagcaccccaggctggtggggggcctcatgtcacccatgccacaggccagtcctggattgctccaaaccctctgcctagggttctgaatgaaataagcaggtctttcccatcaggacctaggtgagcttctgaaaaaagcatcaaaaaggaagcctcctgaacttccccaagtgactgatgcaaaccacgtccatatacttcacagctggggcagaagatcaggggaaaattgcggatgatctgaatgatagcagtgaccaccagcaacctacagagctgcccaaccaggaaattgtcagatggaagcaacgcttgcaggcaaagaaggctgaagcaggccaaggcaggaatgaaacagtcataaatgttggagtgaagcgactgacctccccggtccacaccccggcccagcgtcctgcatctgctggaggatggtggagaccatgtggaggatggggacttggcagtggaggagaacatggaagcaggatatggcagtcccctagcgtcccagccacaagtcctctgaagagtgtggatgacgatggtgacttaggtgcatccttcgaatgtcctgagggggagactggagaagcagacacgcaattgtgggaagaaatcaaaggcataaagaactcacagcacaagtccaaagtctgatcagcgagcaggcctctctgcagggtgcaagggcacagctggagagggagctcccgaagctacagccgacgcttcctgttctgcctgatctccaccgagaacacatgatggggcctcatgggagtccacagaggaggacgcctactgcctggaccttgagcagagacttcacaaggtgcacacatacatgaaccacatgtcacaacccacaaccactacaagaagatggcccaagacctggcccagaaattgaagaaagacacttccagttttcagagggagatcctctgccacaagagaacagcccaggaaagctagatggccgctgcgaccactgagatagaactccaggtgctgcagaaagaaaatgactacagcaggcagaagccggctgactgcaaggccaagttgcagcctttcctgagtggccctttggctcctagggctccaccatccacagcccacaggagcccagaagtgccaagaggggccaggcgtggtggctcacacctgtaatgccagcactttgggaggccaaggcaggtggatttcttgaggtcaggagttcgagaccagcctggccaacatggcaaaaccccgtctctattaataatacaaaaaaaaaaaaaaaaagccaggtgtggtggtgcatgcctgtagtcccagctacttgggaggctgaggcatgagaatcacttgaacctgggaggcagaggttgcagtgagctgagattgtgccactgcactccaccctgggtgacagagtgagactctgtctcaaagaaatgaaaaaagaagtgccaagagtaccatgggctgccagggcccccaggagggaggtgggtcacaatgtgagcgcttgggtccagagcacctaccgatttgattctgttttccctttagccaagttctgaatgcccagagcctcggcagaacatcagccggtgctgctccctttaaagcacttttgattgctctctcgttagtttagctacagcttattgatgctgaaattgctcttattgaagtttgatcatgttaagattataaggtacttttttttttttttttttttttttttgagacggagtcttgttctgtctcgcccaggctagagtgcagtggcgtgatctcggctcactgcaagctctgcctcccgggttcacgccattctcccgcctcagcctcccaagtagctgggactacaggcacccaccaccatgcccggctaaattttgtgtgtgtgtgtgttttttttttttttagtagagacagggtttcaccgtgttagccaggattgtctcgatctcctgacctcgtgatccgcccgcctcggcctcccaaagtgctgggattacaggcgtgaaccaccgtgcccggccaaggtactgtttttcaaataacgattgtttaatataaaaaaaaaatgcacaaggataaagcggaaagtaccagatgtataaaccaattagtaactgtcgcttcttggtggtggtttattttggtccccctgagacaaggatttagatgcagtaatttatttggtgagtgattccagaaggatggaggaggggtagggaaatgggagagagaagggaaagaacgagtgttaaagatcagatgccaccattggcaacgggggctcagtggcgctaggagctctgcgaggtgctggagacctcacctgcgagtggttttacccacagagtaagggagctggggtgtttatccacaacttccttccatcattggtgaggactgctccaaaaggcagtaacttcctggcacttctggccacccatgcgtgattcaagtatgctcctgtcaccagagagacttcaggaagagactcacgggtacctgcagtgggaaacccttggcatggatgggaacagtgggtgtggaggggacaagggaggcaccatgagcatccatcacagggtgcttaagagattttgaggcaaggaactaatttgtagcttttaaaactgaacgcagaaactgtatgcctacaaggtctttggtctgaatggagaaatgagatcttttcgttcatggctatttgagttacttaaatttggacacaatcatacagcgaaccattataaccactaaaaaatgagggccatctcctgtgctaatatgaaactctctttgagttatagttttgagtagaaaaaagcacagtacaaacaatatttagaatatgctcccattttaaaaaaaaaaagctttgtttgggtataatttaaataccacaaaatttacctattttaagtgtaccagtgtagtgttttagtaaatttatacagctttccagaaactttacataagtggaactataccatatatggtcttttgtgcctgactactcccactcaacatagtgttattaaagtcatccacgttgtagcaggtatcaatagcttgttctttttttttaccactgaatagtatttcattgcatggatttatcacactttgtttatccattctacatttggactgtttttaattttattgttataaatcatgctattgtgaacacccacatacaagtctttatgtagacacatattttcacttctcttgagtaaatacctatgagtggaatttctgggtgatgtgttaagtttatgtttatttctttaagaaactacccaactgttttccgaagagactgtaccattttatgttcccatcaactatgtatggtgcttccagttctctgagtcctcattgacagttggtaatatcactcttttctatttcagccattctgatagatgtgttgtggcatcttattgtggttttagcctttccctacagactaatgatgttaagcatcttttcatgtgctcatttgccatttgcatagcttctttgataaaatgtctgttcaaatcttttgcttattttgtgttgggttgtttttctccttcctgagtagtaagggtttggataattgcaattattttctgtaagttcaaaattatttccaaataaaaagttaaaaaagcaattctagctcccatcacactgcagcacccccccattcagaatggcatacttgggaattgtttcatagcgtgggcatcctcactgaaagaatcaaaaggaagagcaagatcagactttcaatcttttgttaaaaatagtcattgtctggtaataatactccctggattactttttgtctgtgaataggaagttggtggttaaaatgtccagatgttgggtaaagaaagacatgagagtactcatgattatcttcctttctttggttactgcagaagttactcagcttcctcagcattgtccctttgggtctgatcaagagtcacttgctttgtatccacctaacagtgcagggtcagattctgagaatggaggaattgaggggagctattcattcaccacccctgcaggaagaacacaggcactagtaagctcagcaatagacttccccactctaatccactccacagtggcctctcggacagtcagccccatttgtggggtcaccattctttcccttgcccccagatcactacttctctctagttctcatataatgaatcaactgcgtgcctgcagctaattgactgagttcaaattaatgggctaatcggccaatagcagaggaaatcaagaaatatgaggtggaaaagaaagaagttcccatccatttgccatatcatgactttaggtcagttggcttgtacttcatggcttctttcaattcttcaaatatttagtgagcatcaactattcattcattctttcatggacaccgaatacgtaccagatactatgtgaggctagtggggcttagtagtgaacaaaagaggcagagtactttctcctaagaggcttccattcgagtgggagaaatagattataacaattgggcaaatgaatacgtaatacatgtcaggttataataggaattacaaaatgaagtaaaacacaataaaaaagtagagacaggtgcataaaaattctggaaggatgtactccaaatgattaataaatagacctgtagcttttaaaatttatgtcttctaaatgttctgtaacaaacatgtattttttaaaaaaatgaaaagttattttaaatatataaaaagcactgggtttgaatgtcccacatgattaattgtgtcacctgttgtatcataattttattaccaaaaatactgaaaaaagttcaactggaaaataatacatagtctttattatctggggtgtggtttcaacatattttaggaatcttgatatctggaaatataaataaattatagaaaactagacatgtttataaaatgccttccagatgggtaatttgaaatgatgaataatctcttccggtcttggtaaacagcaaaatgtgctaaataggtcagaatagaaaaatagtcgtatcacgtgcaagaaacagagaacaaagcattggagcccaaaatgctatttctaatgctgctttgttttgttatgttcttactggcaaatgaagggcaaatgtgtgtttacgaggtcacacaataaaatataaagtgaaaatttcagtcatttggttagcttggcccaaggagactatcaggcttggaaaaatcagacaaaaataaatcatgttaagtaaggtccaatccagccgcttgcctggggctcagctccctggggtgtttggacccatgtttggtaggtggacgtgaggtcgcggtgcacacttgccctttcccctcctcccaccccctccccagtgcttccacaagtctgactctgccttgtcactgattgactttgccttccaaaatgagatgacatgtttattgtctaacatcatcactgattacgacaacaatcactcacaacaactggtgtggtcacacaacatctcaccccagatgtccacctaaatcctccacctctcatgtgattaaagtcattcaatctctggtctatagtaattttatattttatattttggagacagggttttgccctttcatccaggctggagtgcagtggcacaatcagaccgcactggaactcctggaactcaagcatcctcccaccttaggctcacaagtagctgggattacaggtgcatgccatcatacccagctaattttttttttttgtagagacatggtcttcatatgttgcccagtctggctttgaactcctggcctcaagtgatccgcccacctcagcctcccaaaaagtatcaggattacaggtgtgagccatcatgcctggccctggtctacactgattttaaaatccacttggccatttctggtgttagaataaaccaaatcctatccaaatattaatttaattttatgttttataagcttgatcatgtaatatttatccatttaagcaccaacaaagaaactcaaatttgtatctgtgtggattattaactggctctgagctctatggctttctgcagtatttccagcaggtttcaaagtgatcagtcctaataactctgaggtttgcattttgtttatttattttttaaattgcttgttgagtctaacaacaatgaatccaacttgcactttcttattttgtgttcctaggtaattcattattgagaaagcaatttatgctagttaagagaaggcctataatgaggcaagaattctgcttacaaaggtaaagtaatttaagcaaaagctaaaatttaaaagttcgatagtagtcaataaaaattaaagaagttatacataggaatctttgaaattatgtctaaagcaatacattggctccctttttcttataacaaaaaccaagttcactgaaagtaatttatttctttttatggaactacattgtgcattatatgagttcaatcttgccatcaatagatttcttaggctttgttttgaaaagttgcttttctttttcttctttggacttttcaaaagcagaagtttccctgacatgctcggtgtggtatttgctgatgcgtgcatgtgtgtggttttaatttttaggtttgtttcccctcaaccttttctttgagttaatgtgaatcacagctgtatttttcattcctgagcactgtgattcattgccgttgacttcctctggagcccgctacaccacagagtcctgtgggaaactgattagtcactgctgagcaaggtaccttgcaagccatggtcagcatcggctcaaacaactgtctttgggcaacgatgaaagttgttgtagcatcttcctttgggaaagtaagaaagcttccctttaggggttcatatagtttgtagcaatccatggattcatcttgataacatacgggaaaatttgatgttgaaaaagataaacgtcttctttggttaagaagattttgggtcacacttctgccttcaagaaacagacattgatcacagccccttgccagtggcatataaatagtatttgtggatagcttgaaccttactatattggtgcagctttgaaaaacttggaacagattcatttatctcaaacatacttttatctaacttccttgagtctaattttagaaattttcaagccaagggatttttctttataagctagacttacaaagaattcctaaagtcatgccttaacagtaatcaattattctccataagtttccacttgcagttagcattgctgattaacagtttgtgatcacctattctaagggtggagaggcgaccctacctccatttgatatcacctaacctgaaggggctttggcggctatgtctgtgataatgagaactcgaattttcctgttcagagtaaaggctctataagtttaaggaattggagcagtttaagagcagggacaaatggttaaccagttaaataagccaaacaaggtgtcagaagatcaaattctggtttgatccttgggtagccttgggaaagaatttttgccttgctaggcctcgggctttttacgtgtctgttagcatggagagcttgaggtggaaatgcaaacagaaaacagtgcacccgggtagaagttgcatgtggttgccttgcagttagaactgggtcacacaaacaaaaagcctgatcaaatatttcctgaacatataggaagtataattccttaacctctgcataaaagaggattgccagccatattctgttgagacaagaggacattgatacaattcctgatgcatctgaataactgaaagaagatttagaaaatttgcaaatttcaggatgaataagagaaaagtaaataaaaactaaaaacaagacaatattaagttgttcaagagaggaacatttatcataatatactgtgtatttcagtgatgaatacaatattggcatgattgcaatataatcatgtagagaaaatggagacatagtcatatagagaatgtggagacaagaagtgtgtacatttgctagagctgggatgggggtggaggtggtagagttcaatccttgccttccataatggggaatcaacagtctaaaactgaaaattccagaagttgcaacacgtgtgttattacttggaagtaaataccaactgggttggtccattccggctgctctaacaaaataccttaaactgagtaatttataaacaatagaaatgtactgctcacagttccggagcccggaaatcctgagttcaaggtgctagctgactcagtccctggggaaggctcaccctttccttcaaagatgaaggtttctagctgtgtcctcacttggcagacggggcaaacaagctcactcaggcctcttttataagggcagtaatcccattcatgagagcttcactcaagacctaatcacctcctaaaggccctacctcttaatactattgcaatggggattcggtttcaatgtataaatttgggggcggggggcacaaacatttagattatagcaccaacacaattagctaaaaagattgaaagtggttgactctaaggagagggaagtggggagaaatgctttttatgtgaataatatttatggatctatttgactttttgtataattttgatgaaactaaagactgaaaaagtcataagaatttttttaaataaaatcaatgaatcaaaaagaaagacactgatgcccactgaggttcaataacttgtctagggttcaccactgacaatggggcaaagccaagattcaaaagctctcagttcagctctagagcctgagcactccatcactattgaatatcgcctctccaaaaaacattaaatatactcatcatcattcatcattcaatatcaaaaaatgtgaattaaaataacggtgaagtatagtcatgcatcccttaacgatggggtacattctgagaaatgcatcatttggcaattttgccattgtgcaaatgttgtagagtgcacttacacaaaaatggtagagcccactacacaggtaggctatatggtatagtctcttgcttctgagttacaaacctgtgcagcatgtactgtactgaataccatcaggcaattgtaacataaaaataagtactaaacatatttaacatagaaaatgtacagtaaaaatatggtataaaagatttttttttaaatagtacacctgtatagtgcagctccattataatcttatggcaccaccattgtatatacagtccatcattaactgaaatgtcattgtacaaggcacaactgtattatattgtacttttcagatgagcaaaaatgtaaacaattgttaatgttcatggttggcaagagtgtgaagtcatggggatccttgcatcacaagttcttaaaaactgcacatgccttgccctagtaattcactttatagaacttaatttaagaaaatagatgggcatgcccagcactttgggaagccaaggtgggcggatcacaaggtcaggagtttgagaccagtctgaccaacatggtgaaaccctgtctttactaaaaatacaaaaattagtcgggcatggtggtgcatgcctgtaataccagctacttgggaggctgaggcgggagaattgcttgaacccggaaggcagaagttgcagtaagccgagatggctccatagcactccagcctgggcgacagagcgagactccgtatcaaaaaaaaaaaagaaagaaagagaaaaaaaaaaagaaagtaactgggcatggattaaaagatatttgaaaaaaaggctgcaacattgtttaaaatatcaaaaacagcaaaaattaaaagtaaccgaaacattcatcagttggttaaatgtattactatatgcatttcacaggtgtgaaagggatgaggtggatatatttgtgttaacatgaaaagatgtccatgttatattatcaaatgtaaaatgtacatctcaggacagtatgtgcaatatgatcccttcatgtaaaaatgtgtgtgcatgtgcacgtgggcatacatatagggtccggaaggacagatctttaatggttgatgacatttatttctaggtgggaaaggattagaaggtgtcttagctcaggctgccgtaacaaaataccataggctgggtggcttaaacaacagaaatgtatgtcctgtcgttctgaaggctgagaagtccaaggtccaggtgccagcatggtcaggctctgatgagggcccacttcctggcttgcagatagtcaccttctcacacagcagagagaagaagaaccagcaagctctctggtgtctcttctttgagggcactaatcccatcacaagcaccccaccctcatgacctcatctaaacctaattacctcccaaagattccacctctaaataacttcacagtggagattagggctttaacacaggtattcacaaacattcagttcataacaagaggggactttcccttttattgatacacttttgtgttgttttaatatttacaaaatatttaacaattgaaatcgtatatgtatgagacaaggtctcaccgaggctagagtgcagtggcacaatcacggctcactgtaacctcgacctcccaagttcatgccatcttcccacctcaccctcctggtagctgggaccacaggtgcatgccaccatgcctagctaattcttttatttttgtagagatggggtctcactatgttgcctggactggtctgaaacccctgagctcaaatgatcctcctgcctcagcctcccaaaatgctgggattacaggcatgagccaccacacccagctgaaaatatacttttatttaaaaggcaaaagcatatagctatgagtgataagtgatcagagacgacatctaatccaaactttcaatttgtataggtaatcaaagagatttaataaatttctcaaagtcacacaaatgcaaatgcaaataaaaactcaagatttctggtctgatgagtatcaaattactgtaatcaataaagtattaaaataaaacaatggcattatatggttctcattaaatttaaaaggctcaaacagacaactcaaaatgtgtctctaatattctaggcgatttgttgccattttcacatcaacattggtttttactgctaatcctgttgattttaaccttgttttgtgacagttataaagactggtaagatcaagtggccaatgttatgattatttatttgaaaggtgaaaccagaaaacaaagcctgattctaaataaggtcattttaaatggcaaatgaacagatgccagttttaagagactccatcgtagcctttctcagtgagtgagattttaacattgtaacgtatcaccaaaaagtaaagtaatgcactacagactcttaaattgtcactatttcccttaaaccccctcaaaacacagacaaaaaataataatttaggaaatacgagaagtgtgggcgaggggtctgggcatgttacttctatcacagatttggagagatgttggccaattgtcaacagtctgtttctgggtcctgtggtctagagtcccccaagagcaagccaggggtctccctgagccagcccagcctcaggtgtgtttccaccaggttccaggccaggccagtcttcctgggccagtgtggaccatgtacttcctgtggttagctggggttctctaactttcccatctgagtcccctggggagctggtgaaaactccctcagggtttctgatgcgataggtctggactggagcctgataatttgcatttataattccttctgcaccatatgctggtagccagctctgggatgggttgtggagcaagcagacctaatttacagcatttgctgacttccatgcggtataaatactcccaccaagctaccaagggtttcacatatttagtaaatatgtgaaattactgaatatgctgcatatttagtaactggctcttgtgagctggtgtgagctggtgtgaactggctgcagaacattgctgcaggtgagactgatactgctgatctaaacgagctgtctggctttctaccaagagtttcatccattggtgatcctgcccgctttaactctgtttctccacccctgactgtgtgtctcagctccatactcatctatccaactatcctttggtcatttccacttgggagacctacaggctcctcaaatttagctggtccaaagttcaactattttatttttctcccaccatagcttttatctttctagatgtcttattttggtgaattataccactatccactcaagtttcctaagagaaactcaaatcctgtatcccataaatagatcacccatatgtgccccacccttttccattcatctcacatgtgtacaatcattcccctacctgcttggccatccacaatgtcactctcctactcagaagtattcagtggggccccatcattccccataggatcaaacctcaatttgtctctatggcctaaggatgatctgatcttccctgtccagccccacttccccttccacaggacacttgagcctccagcaatagtgggcagtattggatttgttgctctccaaagcacttgctcctttctcacttctagggaccattcctcacgctgctctctctctctctctctgcctggaatcccttcgtctgcctactcatcctttcaggctcaactcagaggctactttttctgcaacacccttctggcctccctcagaagaacttgcactttccgttttctgttcctattgcactggtcacagatctgttttagcagtgatcttgttggtagtgtctgggtgcaaagggctgcattttcacatgtctgttatctcacattgactgcctgggacattatagatgttcagtcatgtttgttaagtagaagaatggctgagtgaattgtgggccaagttttacccatcttcagtgcttaggctgcagaaggtagaactgaaaaggtgaaaccagagttaaacgtggctcattctcctcccactttttggaagatatttttgtctccagaatcttcagacccatgaagtccattctgatctgtgttccagcctttaagatggacccaaatgtatttgtttctaggtggctcacaggtctgagcttcctgggagacctgcagactagaaatggtgcaggactggtctgggacaggttgaccagctcttcaagactgagacagtggggtgagaaatgcctacatctgaacaatgagagtggcagcactctttcttttgattgggcttccttcctgtgttttctcagagcttataaatgaagttagtatagatgaatccaaagaacggcaagaattttcagagggtggatcgacagaatagatggaagagcccattatctgtatgaagagactcaggaagtaaggagctccaaaagccacgaatagattctaaacagatatcctgatttcatcttaaatgctctcttgctcatctttccctgatcccctccaaatgtcttcattccatccggtattagaattacttacagcactggtaagacctctgctaatgacacctattcttctaggcaggataggttcttactgatttacactaatgagagcaaaatacacacacacacacacccacacacaattacaaattcagatgttaaagcaccaaatacatctatttggatgaacatagtaaagttttaattatttatggtcactttttgttgctcatgctaatatatgcattattatggttaatatttttaacaataatttaacttgcaaagtgctttggatgcatttatttagtatgctataatttctgaacaatgtactctgcaaaaagaggtgactatttgcatgaatacatattttttggcctagcaacttagtaaatgaggattttaaaaatatatatttctaataatttctaataataaataatcactagaatagctagcatttattaatcatttgtcatattacacacattgtgctaagaagtgctttttcatggactgtttttattcaatgcccattttacagatgaggaaactaaagcacagagtaactaagtaactgctcaaagtcacgcctttagtgattccctgggatggcccttccctggtttaatagtcgtagagccatagcaaggagacattgctgcttgctgaagtttctcaccttaatgtcaaagctaactggcagtgaacgtgctgaagaagcagaaggtagtgaaagtgttcatgccctggaatctggggactgaatgaagttctcatcttactctttcgtggctgtttgtcattctctgagcaagtgagtgaatggtggtaacatctgctctgcctgcttttttttttttctttttttgtcaaatgatcctttattgaaatattttcctttgtgcttaactagctgggcattctacagcaccactgttgatgtcatctatgatgtcatgagggtggcggccatcaacattacagcccacagactgggcagtccccaggatctctttagtggttccagagagttctctggctaaggattggtgccgcatctgtcgagcaatgttgacgatctcatcaaaagtgatattcccactgtgtttaatgtttttctgtttctttctgtctcttggtggttccttgagggctttgatgatcatggcagaggcagaaggcaccacctcaatctgggcctgtctgttctgaatggttagtttcactgtaatcctcaggcccttccagtcacccattgccttggcaatgtcatcaccaaccttttttggagacagacccagggggccgatcttgggggccagggcagaagtggcaccgacttcacctccggtgcacctcaggtatacgactttgatctcgttcgggtcgaacttcggcagcatggtggaggcagctggtgtcggatgaacccggattcaggacgaccgaagaaagttgcaccttggcctcctccgagccgaaagccgagagagctgctctgcctgcttctatggccccccagggactggtatgcacatgtgctgagttaattgtataaaagttatttgcatgctggacctgagtgagatcctatttcaggagcttcatctaggctccctcccaatggcctttccctttccttcctgtaagaacaagcctacggcagagaaggaagcttcccacgcagtttgctaccacgccttatcagcgggaggcccctgtgcccttgagtgaacatgagataattttagatggaacatcttttttgggcttaggggtttattttaagattattcaaaatacatgtacctagtacatcaaattgtgatttcatcatccttattattatttaaggtgttaggtatatttgtttttaaataatagtatagtattctgtgggtaaggcaaaaattaacgcaggcaggtgtagatttatggtgtatctagtgacactcatgtccttcaaggcccttcttttgcccagatccctcccagtcctgtgggcagtttgcattagtaatttcatatcctttctcctaaagggggcttccagaatagaatgaatctaaggccccctgagacctggatcctccctgtgtgacatggactgtgtaaccattgcaggaacttcttagaatctctaaaagagagattttcctgagttctggctggcagggacacaacaggagctaaggagaaggaaaatggtctagaagagtttttgaaaaatgaactgaagacattagttacagaaactcggttaggtcccgccgatgatcatttccatgtggagaggagcattcgaaggccaccctcttatatcactgttgggatgctgatccacccagatctcctcctctagccatggtgggagttgaatgtgatggctctcagtggccctcttctccaaggcctgctcgaggccacgagaacctcttcacccaggacacactcagacatactgactggcaccaaagcataacagtcagcatggcccgccttgtcaccagtgggataactgtggggtatgagtcatgctctcaagatccctggggatgagaccaggctagactttccctgcaaccactggcttgatctgctctttctcctttcctacctgccttcctcacttccatacaagaccctccctatatgccttgtgcatcccaatatgccttgtgtagttaatctctacttcaggctctgcctctaggaaatctgatctaggactaaacctttcttgacagccctgctacctggttgatgtcctagggtcacccagcggtctgaggccctctgcctccagagcagtccatgccatgtgtgggcagctctgatcattagataggtctttcttagcttgagccaggcagatggagcctcgctttcagaagacagctctcctgccctactcctctccccttcccagtcctctcttaaactaaacttttctaggcccttcagctaggccttttgtggccaggttcctgttctctcacttcctgggttctttccttacctcaatccagtgttgcaaaatcccaccataggtgctcacttaagctgagcccttcattctcactgaaggttgaggacactcagaataggacttccaccaatacggatactgccttggataagcccaaatgctcatcagggatttgggcaactctgtcactgagcttcaaacaaaagatgctctcacgtgtgtttctagtaggctgcaccttgcctcagtgcaccctcaagcgatgttttctgtaaccccactcacaggattttgcatttatttctgctactctcatttgtgagcctgttgtctcagccagttgagttgtattttgtatcctaattatttcatctggtcctatctttccaaagcatgttacaacaatgattgtaggtatagccctgaagatttttagctggaactcagattagcattttgtgataattttatttcatttttcaattcttatgaattcagtttatagcataaaagtatgatttatagtcaatctttgttgctcatgctaatatatgcattattatggttaatatttttaacaataacttgcaaagtgctttgcatgcatttatttagtatgctgttaatttctaaacaatgtactctgtaaaaggaggtgagtgactatttgcatgaatacattttatcttgaccttagtaaaccaggattttaaaaaaattctaataataaataattatgagaatagctagcatttattaatcatttattatattacacacattgtgctaagaagtgctttttcatgaactatttcattcaatacccattttacagatgaggaaactaaggcacgggtaactaagtaactgctcaaagtcacactcttagtgattccctggggtggcccttccctgttttcatagtcatggagccatagcaaggatgtaattagcacatcatatccattagcttcttctgctatagattcaagttgaaaagagagtaaatttaaggaaaattcacaatcctgtctgatagttggcagcaagcattgggaaggcagtacatgaatgactggtgtttaggaaacactgatttataagatttgtcattctctctgctttaagtcatctattagcttaacctctgttcaatccttatcctggtttaacttcttagcaaacatcctgcgcaggacaggcacggagggaatcttggggcctactcctgtttggtggcaatccatcaactgtggctcctgtgtgcaggcatttaactattttcttgtcatcctcttaggcacaaatttttttcttgctaaaaaggtgtcattatttgtcaactccctatttgaaattcagatccatgcaacagtttttttctaattttatttttgttattgttggtggtggtggtggtggtttttctattcgtttggttttgggtttttttttttttttttgagacagagtttcgctcttgttgcccaggctggagtacagtggtgcaatctaagcttactgcaacctccgcctcctgggttcaagtgattctcctgcctcagactcccgagtagctgggattacaggcatgtgctaccatacctagctaatttttgtatttttagtagagatggggtctcgccatgttggccagactggtctccaactcctgacctcaggtgatctgcctgcctcggcctcccaaagtgctgggattacaggcgtgagccaccacaccccgcctttttctaattttctagtctaatagccctgcgaagtacataaggaatatggctaaactgacatagcttgtcttgggaaacccaaactggaccctgggcttgaccacgttttggctaagatacaccatcttgcaaagaattccaagagcaatcatctctcaaatggccctggagcccacagcttcatagctggagaagtctactgccttctctgtttttgaagccaaggaccaacattatctaccagctttgtccagccctctttaattctcctgagtgcttgaaggtgatcacaaataatctcacatgcatttaacttataaccatagtgtggcagtgagtcctccagattggaaaagaaaatgcctatagaagatccaggtacgcccttatgaccgccaaattgacttcaggatccagtcccgctttttaatgctggtctcctcttcctgtcttacagcctttaggtgttcagctgatgtaaattaattgctcccattgtcaaggactttagtaggtttgcttttctttttttctttttttttttttttgctgctagtcaaccacattgtgttccaaaagtacctttaaaaaggtattttatggttttatttagctttgttttatttgtaaaatacccttctcctgggctgtaggcttctaggcattattcacacagatccagcacactgtttggggtacacttaagcctctagagcccttacccatatttgcatgctgcccagctgtgagttcattgcaaaggtgcagactcacctgcttgtgatacctctccctcttagctactgacttatttgtggtgtcagaaccccattttcaagaacttcccattctgtttgatgggaacgagggcactttttatagactccaactcacctttaaactttgtgaaatctctgtttgtaaaccacaaaatttatcagcacaactgagtttcccattcctagcttttgtgaacataaggatgacataagaatttcctcttacaatgcctctcacttccacttccccaatcagttcctccccgtgaatcggaagtaagttgagaatagcagctccacccacagctttctgatccttctgagggctgaatctgcccacaagttaggtcaagtgtgtgtcagaaatggtttttatcacagagacactatgagaatatgtgcggacagctgagtctgccacctgtctttctgcctgatttctgcagcaggaatgaatcactcacttcctgcgttgatggtggctgtggcatcctgtcatcacagtagcccttttattctattcctccattcatctccattatcttctaatatgaaaaccattatgtaggtgcatagatttatttgtccttgacttaacagagacagcttagtactctccaaaagaaaagaaaaaatatgtttcttatgaatggaacatgataaaatatgccatctcttggttgcattctaaccgagtgtcccattccctgtgatcttgctgactcctaggaagttctgcagagctgatcatttcctccaccatcctaggtccatttttgcttgttctgctctgtatgatcattgggatggtccaaccggctacgtcgtctgaggctccctttgctaactggcttcctgctaggcttggtttggctcatgtgaagccctggttgatagggtgggtggaaggaaaggaaaagccagggcatttcaccacgtttaatatactaatgattcaaatttgtgcctcagcaaacatgcagattacctgggatcctcagcagagaataatagctacctctggaaatagtaggctcatgaatgctaagaggctactgaaattgccacctatatgatgggacgctttgggtgagaggttcatggaggttctgattgattgggttcttgaagagtacatgagcattttcctggcagatctactcatgacagacatcccaggaagacagaagagaagatgagcagttatggaaacccaaagttgtatggcgtgcttgcaaattggattaacttattaatttgtaggactttgggggcatgataggagatgaagccaaaaaaagaaaaaaaaatggattgaatccagtatatgaaggaccctctgtaataactatgctttctcccaggggtgagttcacaggagcaacagagagctctagagtgaggagggtgggaagaacaattttgtatatcatctacgttgtatactgggcttctataggctgttgtgtttgatgaaagtgtgccggcttaaaaagttcaaaaatccactgttgtgactataggaaatgtattggtcagggtttttagatgcatactagagaatcgcctctagctggtttaggcagggaggggtactgaggaacagagttcccaaagtcaagggatggatcaagcagtggggtttaggctgggcttcccaagtgactcccagaatggcccaccagaatcagcccaccaaggggttggccactacggaaggggtcaggaagctgctgaattgggagaccccctcagggctgctgctcagagcaactccagctctgccatggcccctgaccacaaaatgatgcccctgactctgtctcattccctgcatcactcagttcccaacaaagccttgtgggagcccatctgcgtggtagaatctaaatcacgtagccatatcccagcagcaaggaggccagaaaatgaggtttctgttgtcttatttttgcatcgtatgttggaaagacagaaattatcctgaacgacactatcaaaatacggattgtgatcaaaagatttgggggatacccaaatgatagcagtccacctcaggaagacatattttccaaaggaagggagagtaggatgaaatttgcattttaaaatatcatttttatgaaaccatttgttttttagccaaggccaatcctgatgactgtgtgaggtcatgagactgctggtttctctaactagcttcacatttttttttaccaagttctctaaagccaagctagcttttcattaacttttatgccaggcctcaaatcttcttttacttacatggcatgaccttagaatcctttcttggcctctctttcatgcttcattcttgtgcagtttggtgaagaccccctgcactctcaggtgtagcatcttcctgccacatgagggataccttaataatatgaccatcagccacaagcctcagccctttccaatgtcatgtcccacagtgcataacataccagcaaatgtttatcacaacctactcaaggccagtcattcagtttccaggactctcaatgaggttgggccggaatttcctgttgctgtggaataaagcatgaacaactgccacatgatgtgttgctaaaatgaatgcagtatcattagcatggtggacactgtgatgcaccaccagatgccccttaaggagggacttgttgcccggctgctgggagtgctgaccatggggagtctatagctgccaccagcccctgcaggggtaccttggctgaagggggctgcctaggcaagggtcatgccatgcccagggatacccacatccagcgatgactgatgctggtgggggtacaatggcatagccatctcaccccacctcgggacacccctataaggttgactcatcctgaatcctgaacctcatctccatgtccccgtgtccactcctgcttccttcccattccacaggcactgatcccacgggcgctccttaataagtctcttgtaccctaaactctgtctccaagtctgcttctgggagaccccaacccatgaccatcagcctcttctagaagtacacagatgccccagcatgccacactccgggtagatactccaccctcccagggcacccaattcaccttagaaatgtgaagctgccaactgctctcagcaaggagatgtctggtacttggtgcttggaagtagtttcgttcgtctaaaaacgtaacataaatttttacattaacattttttaacctgaaaaaattgaattctagttagtgatatgtatgttagaagtatttagtgggaagtacagacatccaagtttttcttttaaatgcaccaaaagtaagatggattgagggatgcgtagagggaggtagagatggaaaaatatggataaaacaaatattgtaaaatgtcagtggtaaaatcttggtggtgtgtatgtgagtgttcactgaaaaattatttcaatttcactctgtttgaaactttttattttaaagtattgggaaaataaataggtgtgactgaataggaagagtagaccgagattgttttatgaactgatttcaaagataaagttaagcccgtcaagtacttgagattatatcagtgtaatttccctgatacatttgaacccatcgtttatttagcaaacattcgttgagcaggtacaatgagcttggatatacagtaagtgttccagggaggacaaagaaatataagagctatattctgcaagtttattgtagtagatacaataaatacatatggaaagttaaatagtaatagttcatatcaccctagacatagacttttaaaatacatggattctccttcttataggagatagctacaaagcaaaacacaaacaaaaacaaatgcatgtattggttctaccatacagataatgtttctagcaatgaataataacaattataataataatgatagcagatcttacacagtgttcgccatgtacctggcagtgttccaagggcttcacctatttcaatgcatttcatccgtacactgtgtggtggtgagaatgtatctgcagatttgcaactaaaggggacgtgactggccgagggcaccacctgctgtgctctctaatccatcactaaatttctaagccagtggctgagcccagtggggatactaaggcaagcacattcccaaggacgcaggcggcctctgatagtcatcgctggctctgtgactcccagatggccttgccaacctttctaagccagcatggtgatctaggatgctgtccccaaccttccttcctccccactctcctttacagagacaagacctgtgtggcatcccgatggctctccccacctccctagactgcctccctcttgctccccactgtccctcccagggctaatttttggaaatagtaaaaaagactcaccctcaagcacgcctttcaaaggcaaaccaaccactctgtagcccacatcccagccacctctttcatgtgctcccaccctccgggccatgacccaccagccctgatcaccccggggccaggtaccagacaaccagggacagccccttccttagtccctcagtgccccagactgggtaacttagaaacaataggcatttattcttaacagttctggagtctaggaagtccaagaagaagacaccagcaggttcagtgtctggtgagggctgctctctgcttccaggtgttgctgcatcttctggaggggacgaatgctctgtcctcatgcagcagaagggacagaaagggccaactcacctcctcaagccctttggtaagaccctaatctattcataagggcaggtccctcatggccttctcccctcctaagggccccacctcttaacactgttgcactgaggattaagttttaacatgaattttgaaggaggcacagacattcaaaccacagcagcccctatgctccagagcctaatgaaattattcaaaccacccactcctaagccggattaccctgccctacatgttcctccccacggaaaccacagtgaaagctcccgcccacagttttcccctcaccttctgcctctaacagaccttggtgcttccctgtgtggcccctgacaacgtggcaagccctcctcttgggatctgtgagtaacaaaccgtcttttcaatgatagtcatctcctgatatgctggtcttgccaaaacaaaatcataataaaacctatatctatatatagatagatagatataggttatatatatatattttaactttaagttccaggatgcacgtgcagaacatgcaggtttgttacgtaggtatacgtgtgccatggtggtttgctgaacgtattgactcatcctttatgtttcctcccctcactcccgactccccaacaggacccggtatgtgttgttccccttcccgtgtccacataaaacctatattttttaaaagccagttaagtacaaatgtcccttggtgttcagcttttctgagttactgtttacaacgtgttgagctcttaaaatagcaagaatgccaagaatattttgctctcaattacttggttttatggtcttacatgcacaaggaagagaacagaaggtatctctatatgagtagtgagtgtagcagtgcgcttggggccccaccagatcttcaagcctgggctggtgccccaccgtgttaggagtggtggctgctaactggcctccctccccaggagattctcccctatgagatgcaaggcagcccacagcccgtggctgactagcacaggggtgcaaaagtgcagtcccctcgccccagtgcaggaccaaatctgtgttcaaaccccagagctccctgcaggcttaggctgaggttggcatcctgctgaggtcccattcccctgccccctcctgcttgtccccgtccccttctcctgagagctttcctccaccacatcgcctgcacaaggatcccctgtgagtgagacccccagtggcctggtaacccacaactaagcatcacatgaaatgtggagggaccttgtgctgggtgcaaggttttcccctagtgtgtgtaatggttatggatcatttagtgactcctgctaatctccttagtacagactgtcagagcctagttaatggatcagcccataggcagctccctaaatattccacctataaagaacatgaaataaaccactggcatgagcagcagattacctacgagcaaattcacatcccctcattcagctttttgcttaagtgggaagatgcaactgggacccatttttgccaaagtggaagctgcctatgggtgacaatagcagggagaagggatagcccatgtttatggggcacttgcttggtgccaggtaccctgctaagcacaggaaggacaaatggcctaacccaaatcgcacagctagtaagcagcagcattcagccccacagctgcaacctcccacccagtgcgacgctctggttccctgacaggctcctcctcctgccctcccacccccttaaaagtggaggagcaaatcaagaatactggtgtgaagggaggcacctcatggctggccctgttggctgtatttagtcttcagatttcataaatatgcaaactaggaaaatagaatgatcttcggtctttttagttttttcttttgtttttgtattattcttatcttttgtggtaacatgtagacctgacatcccaatcttctgtcttttaagttgtataataaataatgttcatcattctctttaaaacttgactctaggccaggcacagtggctcacacctgcaatcccagcactttgagagactgaggcaagagaatccaggaggtcaaggctgcaataagccaagagcaagccactgcgctccagccagggcaacagagcaggaccctgtgaagaaaagagagagagagagagagagaaagaaagaaaggaaggaaagagagaaagagagagagagaaagaaaaagagagagagaaaaaagagaaagagaaagaaaaagacagaaagaaagagaaaaagagaaagagaaagaaagagaaaaagaaagaagaaagaaagaaagagggaggaaggaagaaaggaaggaagggagggaggaaggaaggaaggaatgaagggaagaaggaagggagggatttcctagactaactcccacattgcatctatcattttcttcatgtctgcactagtaattgtgtaaattatagcacattgttttgtttatatacatatacatatgtgggtgtgtggtggtggtgaatgtgtgtatctataggtatgtgtgtggaatgtatataaatcttctttattgtttgaagtgctcatgtgtaaatgtttttgccttcaacttcattaaaattttttgagggcagaatattttaaagtcttcaataacaatcattatattactttaaacgagatcagataaaaaaggacataaataaagtctactgagttataaaaggagtaaaccgaatttcacatcatttacatgaggcaattaaaagatcagcatttaaaaagctatactctaaggtaaataaatcagtacctgaaggcaaatggtaaggaaatatttagttaacagaaagaagtcagtttatctcaaaagccgtcttccctgaaattcgggcctgcattgctttgcttaagtaacagcaaatatgaatgggaagttgagtggatgctcagaattatttaaattttttcaagcttttttcaagcactccgtttagtgaaccaggctgagtaggaaaatctctcctctccatgaacttgtttaattgcagaaaagctacagaaggaaaggttcctggccagaaggagagagtgcatcttgctcctctaaggatgacagtcgatgagggaatccagggtccttgcctgtcacacattcctctgagctctgggcactgtgctaggaccgggactggctgcctttgttcctttggggcatggccaggccatctggtattccgggctaccagataagtcgccctgttctgcatcccagagggagagttgagctctgcaccaagcacttagggacagagcagtggtctgagctcagccacttttgttcccacgactggtatcatctggtgacatcagatgctgcacaatccatgtcgactgcagaccactaggcaaaatgggttacagaattaatgcactgagtgctccagcgattataacactgaacataagagatccccatttcttccaggtaaattcttgtttcaattaactaaaatttgagtgaattcataagtgactagttcctcatgacgccatcgcaccaaaactaaattaaaggattaatcctcaatttccacattagtaacttaaatattagagcatgaaaagatttgtaattctcattacagatcactggctccttcttcagaaaaattggactaattagatctaacttaattcctcacagttatgtccctactttaattggaattacattaaatattgatagtaaattaaagaatattttcatggatagaatttctaatctaccaattaggagaccatgagctctctctctctctctctccatttatctaaatctttcttcatttctcctattagggttatataattttgaacggctcttatgtttattgaattatgtaattctcatctatttaatttttgtagctgttatgatagaggaagataatgagtttctgttccattactaacattaaataatgctgttgatttttacgtttataggtaacatcctataatcttgctgaacttaactattttcttaaataaatttttgttgatttttgccaaattcaaggtatataatcacattattataaaaagcaacaaaaatgcatcagagtcttagtgacaagtattaattttagaggaatgggaagatattgaaagagcctcatcctggccactgcgccattgtattaactaccatttattgtatatcatgtgcagacacctcccctaaagctttatctatataatttccatacaacactgctgtaagatgggtactgtaatgatccccattttgcagatatgtgtggaaactaagcctcagagagattaagtaacactgaacatcacacaccgccccccccaacacacacacacacacacacacacacacacacacacacacacagagtgaattacacagcttgggttttaacccagctcagtgtgagcccagaatctgttcatgtaatagcagcaaaaaggaaataatatacttgagaattaactcaatacacatgaactattcaaagaaaattaaaatacctccagggaaaataaaggctctgagaaatccacagggaagcattatctctttcttaatcttcactaatttcacaaatgagaaatagtctcttgttgtcagtttaatttgcgtttttgttactaggaagtttcaacattttcaaattaatcacatgtcttttctatcctgtgttttttctattcaaaatttctaatttcaccattgggatactagagtttttattgctgtatttaaattcattataagttaagtatattatcttttataaattcttagcaaatgataagccaagcttttgctttgctttttaattgtttattatatatgctgatatacagataactatttttaatataattaaatttgtcaacctttttctccttgattctttcttttttctctttcttttttctttcctttcttcctttccctctctttttctttctccatccttctttcctttctttcttcccctcccctgtctcctttcctttcctttcttgtgggagtgaatgttgagaattatcttctcaatccagagataagacagacatacgcctatattttcatctggtttcactatttattgacttaactataatatatctgaaacatattttgagtggaggggacaagaaaaagaaagtaatttattcagctggctaaaacagtcacttcacaaaaatcagagggttttttaattaaaaaattatcctcagattttagttaaaaaacaaaaacatatcttctctcattggaaggctatttccatcttcttttaacatgaagtaacttttgctagttacattctgacttctttttaaacagattctgcaataagtaagtctaagatcagtcatactacattgcataggatattgtgaactaagcttgcatttgttttgtgtcttgaggaagagagatatggcctggttaattaattaatttacccaatcaagtttaagagtgatgttaattttaataagactgttactttttgtactttctaaaaattaaagtatgatctacgtactataaggttcatacatattcaaggttcatccatgttgtaacccatatcagtaattcagtcctttttataactacatatatatttcattgtatggacataccctattctgtttgtccattcattaatttatagacatttggattgggtccactttttggctattatgaataatgctgtgtgaccctgggaggatcgtgtgtggctgtagccactccctttatcactgggattcatgctgggggctggagctggctgcttccagtcaggtctctttcccgcatggctacaggaaatcatactcccaactgtggtgaaatctaaaccaatggcctggatgagtcttttgcagacaggtttggcactgtttggatagcttggcaagtctctgcacacctgcactccggcgtctatttctctagtgtgggaagtaactctgggtgcagggctggtgctgagggtaccaccgcctccccacacactggggtccccgagacttcacccgagcctcctctccagcccccaaacctccacccagtggcctgacaacaccagcttgtcagcctggatggcccgggaggcctctaggatcattttaaatccatccatgagtggaccaacctgatgattgggaacaggattccagcaggactgttgggtgagattgtttctgcagtgggaggagcacaaatcagagtctgcgcagccccagtgctcagcgcctcatggatgttccctggcatctgttacgatccccctgtcagctttaacctttgcctgacaaccatgtggtttctaagggaggaacaaaaccggtgagaaaagctactgtgcacaaagtcccttttgttggtacgcaattgcataaatacttgagaaggaaaatgaataaaggccaggatgggacctccctcctcatggcagtgagaataacttgcccttgggcatgccctggaacctgcctacagctttcatgggctagatccgccgtatcataccagccacagtgtggcgactgagcaggacctgctgcccacattttgcagatgaagacatggaaactcgatgaggttccataacccagccaaagtcacaaaaccacctaagtgatggagttcaccatgtctctgggtccctggcttaatgcttttctctaccaggggctatttacccactcagagtctgttctgtcttaagagaattgcttggctagagaagatcctttccttccttctctctaccacctccccctggaggatctagttccacccttacctctggtttctctcctgggcctttcttcttgcacctttgcaaccctgtaccccttccctctccacttttctttgtgcaatatggctagcaaggtcctcccctttcccactcaccctctgaatgaatcctatctaaaacacttggcttcaaatccaatgggacatttgaaatgtacagtactgacatgtttaaagtgagagtaagcagtatctttaaatcaaaagtgcttctgtaaatgcaaaattgaaacccgcctttcctgcagcagtaaagccttagaactgcaaagaatttgaaagagtagctatttataaaaaatatgttaatacatgtatttgaggacaattgcctaaaattaatataccaaatgataacagtggttacttcgaggtggcaagattatcaatgtttttgatattcttcttccagctttattgtattccctacaatgagtagttattatttctataatcaaggaaaaagctgaacacttttagttttagccaactccaacctcaaatttcacaaacagagaaacagaaacttggagagaacattcctggtcacacaaaggtttgccagtggaagtgggtgagtctgggtctcagggtttccttccccactccttttccctggtgccacaccttggtaagacagtggccacgctcagcactgcatacttgggcagcagtttgcggttggttggttgtctatccttacaaggtgcctgattttcaccagcgtgaccgtgagcaggcaacttggggaaacacaagttaaaagaaagagttgttcttatgttcttttttaaagcgcaaacacacattgtcatttcctttccatagagagcccttccccacagtttataggaatgccttatcattgttgacatagcctgttcatgggcttctgtcaagggtaagtccccatgccccttagccaaccagaaaccacttctgttaattgaggaattgtctttacatgcccttacgttcagtcacgccttgaagtgctgggagaacatcttcatccaggatgggcagtgagagacaaagccttgaatccacacagttccatttcctggggacccgtagagcatttttcatgcatgttccacaagctcctttcatgggcacctcattatgctcagagttatccagagcaattgatgaacaaatgtcttttctttctaggaactcacagatttcaaatcttgaaaactggttaagagagtttgttgttgagagatgagacataacccacatgtaagaacgtttccatcatctccagtgtggacttttgtctcacttttctcttttttcttcggcctctcttattctccaaaagttatctgttctttagggaacatttgatcctatgggtcattttcaatccctcgttaactacccggcaaggactttattttcttttagagatagggtctcactatgttgccaagagtgagagtgagagtggctattcacagatgtgaacatagcacattgcagcctcaaactcttggcctcaagtgttccttccaccccagcctcccaaggacagtaaaatccttttgaaaaaatccttagccgagtgaggtggctacaggcgtgagccaccacactcggtgaagggttttttcaaaaggactttactgtgatttttttggcagtgctggcttgaacatgaattggcttttgttctttcagttctattgaagtgaattaaatctataacctcacctggagttgggagtaacaaacgcagccccatagattttgccagcttatggaattaaaaaggccaccattgaaatgacgatctgaaccataaaggcagagtctcctctttccctgctataaagtgttcatgtttatttgggggatgatccaggcatccacactgtaaaggggcttatcatgtgacaaaagtgaccttttcaaacactgaaacctgtgagagcatcccacagctgaaaatcagggaagggaactgggaccaatgagaaaaagcatttaaggatgcacagggctaggctggcttgcaggcagaactgcccttgtacctactctgtgcaggtcctgctggggagctttgtcaatatgaaggctaagtcacatgaggaagctgcagaagaaaagtttgaagctaacaaagttagttcatgagatttaagaaaagaggccatctgcaggtgccagtggagaatctgcagcaagctgtccagaagatctagccaagataattgataattgcaactcactacactaaacaacagattttcattgtagatgaaacagccttttgttggaagaagatgtcatctacagctcttatagctagagagaagtcaatgcttggcttcaaaacatcaaagaacaggctgactcttgttaggggctaatgcagttggcaaccttaagttgaagccaatattcatttatcattccccaaatcctagagcccttcataattaggctaaatctactctgcctgtgctctacaattggaactgtaaagcctgtatgacagcacatctgcttttttgtttctttgttttttttgtttgtttgtttgtttgtttgtttgagacagagtcttgttctgttgcccaggctggagtgtagtggtgcgatcttggctcactgcaacctctgcctcctgagttaaagcaattctcctgcctcagcaccccctagtagctgggattacaggcactcaccaccatccctggcttttttttttttttttttttttttttgtatttttagtagagatggggtttcgccatgttggccaggctggtctcgaactctggacctcaggtgatccacctgcctcggcctcccaaagtgctgggattacaggcgtaagccactgcacccagccacacatctgtttacaggatggtttactgaatattttaatcccactgttgagacctactgcttagaaaaaaatacatttctttaaaaatattactgtttattgacaatgcatctggccacccaagagttctaactgagatgtaagaagagattcgtgttgttttcaggcctgctaacacagcatccattctgcagcccatggatcaagaagtaatttcaactttcaagtcttattatttaagaactacattttgtaaggctatagctgccataggtagtgattcctctgatggatctgagcaaaatacattgaaaaatcttctgaaaagaattcagcattctagatgtcacaaagaacattcatgattcacaggaggaggtcaaaatatcagtataaattggagtttggaagaagttgatgccaactctcatgaatgattttgagggactcaagacttctgtggaggaatctgctgcagatgtggtagaagcagcaagagaatagaattagaaatggaacctgaagatgtcgttgaattactgcaatcccatgataaaattcaaatgaatgaggagttgcttcgtgcaaatgagcaaagaaaatcgtttattgagatggaattgctcctggtgaagatactgtgaacagtgttaaaatgacaactaaagatttagaatattttataaacttagttgataaagtagtggcaggatttgagaagattactccaattttgaaacaagttctactgtgggtaaaatgctatcaaacaacatcacatgctacagagaaatctttgatgaaaaaaagtcaatcaatgtgacaaacatcattgttgtcttatttcaataaattgccacagcaacaccaactttcagcaaccaccactctgatcagccagcagccatcaacatcaaggcaaaactctccaccagcaaaaaatgacaacttgctgaaggcccagatgatcgttagtatttttcggagataaagtatttttacatacacaaattgttattaggtacttaatagactatagtagagtctaaacataacttctacatgcactggaaaaccaaaaactttgcatgactccctttattgcaatattcactttattgtgatatctgctttattgtggtggtctggaaccaaaccaacagtaactccaagaggtgcctggactaccacaatccaccagcatgcgcgaatatcaactgacaagcaatattgaaaaatatagtcacttttctttaatttcttttgaaaagaactaatcatattagaagtaaaaagttattctgaaaaaaaataacctttagtcctcaaaatgatttcaaatagaaactactgactttataaagaatacattttatccttctataaaacatgcaattctttgactcattaactattcataacttttaaaaacaacatgatttgggcaaattaacaatctttagagtacaaataccttcagtggggaagaataaatctttaatttcaatatgatggtaaatcatattgaaatcctccagtatgtcaaattccaatgccaaaataagggagagtagctctagaaatgatgttggtggagtgtttttccagtttggctggcaagattggaaacagtttgtaatttcaagcctgtgctgttgggagttccctcattaaacacttcattacctcagatatgtgagggataaaaaaacatcacttgcctttgaatctgggaccaactattctactaagatataagctaaaggctcaaagccccttaaggttaaactgaaaccactcgaatataaacatgataaataatggtgtttaattttgctacaatttttcctattgccaatagcatgcaaccatattgctttcaacattagcctattgtaactcagaaaagtcttattgtcccaaaggaatgactactgcaggggacacaagctcaaaaactaggtagtcaagcaaatgggtgcatggctggtgtgtgacaggtgggaatggtggagaacatggccaactagagagctgctgctgctgctgctgcttcttcctcttcttcttcttcttcttcttcttcttcttcttcttcttcttcttcttcttcttcttcttcttcttccttcttcttcttcttcctcttcctcttcctcttcttcttcttcttcttcttcttcttcttcttcttcttcttcttttaattatactttaagttctgggatacatgtacaggacatgcaggtttgttacataggtatacacgtgccatgatggtttgctgcaccaatcaacctgtcatctacattaggtatttctgctaatgctattcctccacagtcccccaccccccaacaggccccagtgtgtgatgttcccctccctgtgtccatgtgttcttgttgttcaactcccacttatgagtgagaacatctggtgcttggttttctgttcctgtgttagtttgctgagaatgatggtttccagcttcatccatgtccctgcaaaggacatgacctcatccttttttatggctgcatagtattccatggcatatatgtgccacattttctttatccagtctatcattgatgggcatttgggctggttccaagtctttgctattgtgaatagtgctgcaataaacatacatgtgcatgtgtctttatagtagaatgagttataatcctttgggtatatacccagtaatgggattgctgggtcaaatagtatttctagttctagatccttgaggaattgccacattgtcttccacgatggttgaactaatttacactcccaccaacagtgtaaaagctttcctatttctccacatcctctccagcatctgttgtttcctgactttttaatgatcaccattctaactggtgtgagatggtatctcattgtggttttgatttgcatctctcttatgaccagtgatgatgagcttttttttcatatgtttgttggccacataaatgtcttcttttgagaagtgtctgttcatacccttcacctactttttgattttttttttttttgtaaatttgtttaagttccttgtagattctggatattagccctttgtcagatggatagattgcaaaaattttctcccattctataggttgcctgttcactctgatgatagtttcttttgctgtgcagaagctctttagtttaattagatcccatttgtctattttggcttttgttgccattgcttttggtgttttagtcatgaagtctttgcccatgcctatgtcctgaattgtattgcctaggttttattctaatgttttcatggttttaggtcttatgtttaagtctttaattcatcttgagttaatttctgtataaggtttatgaaaggggtccagtttcagttttctgcatatggctagccagttttcccaacatcatttattaaatagggaatcctttccccattgcttgtttttgtcaggtttgtcaaagatcagatggttgtagatgtgtggcgttacttctgagggctctgttctgttccattggtctatctacctgttttggtaccattactgtgctgttttggttactgtagccttgtagtatagtttgaagtcaggtagtgtgatgcctccagctttgttctttttgcttaggattgtcttggctatacgggctcttttttggttccatatgaaatttaaagtagttctttctaattgtgtgaagaaagtcaatggtagcttgatggggataacattaaatctataaattactttgggtagtatggccattttcacgatattgattcttcctatccatgagcatggaatgtttttccatttgtttgtgtccccctcttatttccttgagtagtggtttgtagttcttgaagaagtccttcacatcccttgtaagttggattcctaggtattttattctctttatagcaattgtgaatgggagttcactcatgatttggctctctattattggtgtataggaatgtgtgtgatttttgcacattggttttgtatcttgagactttgctgaagttgctgatcagcttaaggagattttgggctgagacggtggggttttctaaatatacaatcatgtcatctgcaaacacagactatttgatttcctctcttcctatttgaatatgctttatttctttctcttgcctgattggcccagccagaacttccaatactatgttgaacaggagtggtgagagaggacatccttgtcttgtgccggttttcaaagggaatgcttccagtttttgcccattcagtatgatattggctgtgggtttgtcatgaatagagatagcaccttcttctatgggcaggggcaccagttactccatccagcctaccataattacctgagaatacaggacctgtgctcacagaccttttgatttttcaaaagacaacagaaatccagatttgtaagtagtatctcttaatttttgaacattagcaactattccatttttcttttgtttatctctttttgtaatattgggcagaccaaaattaaattactgttttgccctgcagtcaacattgttttgtcactgaataggataatggcacagctgagttgctgaagatcctcttgagggatgctcattgattccttttttgctttttatccttcatctgaagcatttagcatttgtttgcagttttcatgtaatttttcccttagtgaaagtccaaagggttttgatgctcatcagctcactctacccttgctcataaaactgtcagtttaggccacagttccttactcttcatccctgagatatgttactactaagtgttgtaggatttctcagggtggttttgaaaattcacattttaaagaatcaggaaagcttatgcataaacgtgcatgcagttaaaagggaggtgcctagactggcagtgggctcaacaagagggtagaggtgctgccacttcagcttccggagacccagagggggttctagaagtgtggcacccagcacagtagtcccagaatacatggcactgtccagcacttgacgtgtggcttgtgtgaactgagatgtgcaatcagtgtaaaatacataccagatttagaaacataatgaaaaagagataaaatatctcatttttgaaattggttacatatttaagtggcattttagatatattgggaaattaaatagtattaaaattaattttacctgtctaatcttactttttaatctggttactagaaaatttaacattatgactgtgagtcgcattatattctactgatcagttctgctctagaacagggaggggcccataaacttttttctgtagagatccacagagtaacttttttaagctccacaggccatatggtccttgttgcaaacattcactccaccattccagtacaaaagcaaccatggatgagatgtaaatgaatgagcagggctgtgttccaataaaactttatttgctaaaataggcaggggccagatttgctgactcctgcttgatgagaaaataaaagcaagggggagggaggggacattgaggtgttggtggcattctgtttcttgatcttaatgctagttaagtggtgtactttttgaaaatccatcgagctacagttatatgatatgtgtacttttcatgtacacattatacttcaataaaaagttgacttaaaaagagcagggtctcggccagacaaggtggctcatgcctgtaatcccagcactttgggaggctgaggtgggtggatcatgaggtcaggagatcgagaccatcctggccaacatggtgaaaccccgtctttactaaaaacacacaaaaaattagctgggcgtggtggtgtgtgcctgtaatcccagctacttgggaggctgaggcaggagaatcacttgaaccagggagtcggaggttgcagtgagctgagatcacaccacagcacttcagcctggtgacagagcaagactccatctcaaaaaaaaaaaaaaaaaaaaaagagtggggtctcttctggaagatctgactaaaagaaaaaaagccggagatgtacatctgctcttattaatcagtaacaatcctcttcccggtttaagaatgaaacagtttttttttcacagtacatagcagttatttatttaaatacttgaaaaggttgatgatggaaaaaataggtttatcgtgagtttatatccattcgatttattttatcatttaaaaaactactgcctctaggttattctagcctgacatagaacacttttgacacctgcagttactgtaatatactataatagacacagccattatagaatgatttccacttgggaggaaattcaacagtagtaaggatgactctttatttaaactaaaatcatttttctaattctctaccatcagtcggccatttagttgtccaaactcatctggctttcctcaggtctctgtacatccattccgtacaatggtcactacctttgtgagaattgcactgggacaaaattcaagctattggccatttggggagtagtaaggggatagaattcactggatatcaaaagcctaaactgtattaaagttgtgtagacttaaaccaccagattttgcaaattaaaaaaaaaaaattctggttccctgtgagctcatcctgtgcagaatgaatatgcaggttttactattttgccatctgaatatagacagacagaaaagtatgacttttccttctagacctcgatactgaccaactatcaagacacttgctcaggcctgctcagacagaaatgagaaagcgtggaaaccggggccgaggttagagaacaggacagccatggacacaggctcccaaggtcagggcatggaagtgccagacccagcagggtcctggtagctgcgagagcatcgttctaccccgactctgctcctgctcagcagcaaagttgcagagagagagagcttccagaagtggaaagatttttaaataagtcttttaactttttgcctgtggatacagctgcgttgacacaaagccacatttgaggcatgatgtctcggaagcctggcaccacggactgtttttctactgggacccataattgctgccttttaagaggtgtcctgtgttcagttttatcaatgtggtgcttgaaccggactttcagctgactcccaaaaggaaatagttttaaaaggaagaattttaagtctgccaagagccagataatggcatagcacagagaaaagccagggttttgtggtttgtatattaaaatacaagtctcttaatgcctcaaaacagcagcctccagaaaatgggaagtttaatagatgaggctagagaaagcagttttaaagatcgaaattttccctctttgttccttgtgatttacccgaaaggaacaagttcctttctcctgaacctcctcctatgtctatttttggttttatacaagtgactgttctcattaaagtaaatctcaaagtgctctgaaaatgtccatgctgggctgccggcctcacgcctgaggagcttttggcctggacactctgcaaaaatgtgtcctgaggacaaaggccattaacatttggttaatctaacatcataaattacttttcccataaattactattaacagacctccctccatactttttctgagtgctgtcttgccgtttttaacctcccttacatttccacccttttgcccaacacagaatcacatgagagcccctggaggacacgggggaggggtgggttcagctgttgtcctagcacagtctgcagctcctccgtgcaggctgttgttttccctgacagtaatcatctgtcaggagaaatgttacgtatcccatcatcagtgtggactctggctggactctagacaatgcacagaaccatcagccatggtcctcacaaaccacttggccactattgtcttcttaccttctgtttgtagcagtcactgcaataggttgggccaggggacagcagaggaggtttggggatgcctgaattcaactggaatgccacctacacttgtattatccaacacatgcccctggtgcagtgtatttggttttaaaaccagttttaaacggatgcacattgtggttagaaatggcagaccaggctgggtgcagtggctcatgcctgtaatcccagcactttggaaggccgaggctggtggatcatttggggtcaggagttcaagaccagcctgaccaacatggtgaaaacctgtctcctaaaaatacaaacaaaaaccaaaaattagcctggcatgttggcacatgcctgtaatctcagctactcaggaggctgaggcaggagaattgcttgaacctgggatgcagaaattgcagtaagccaagatcgtgccactgcactccagcctgggcaacaaaagcaagactctgtcaaaaaaagaaagggagaaaaggaaggaaggaaggaaggaaggaaggaaggaaggaaggaaggaaggaaggaaggaaggagaaagaaaggaaggaaggaaggaaggaaggaaggtaggaaggaaggaaagagaagagaagagaaagaaaaagggcgaatttgcctaacctgcagtctgacactgatctctaggcatgctgggtgctgggaactggggtgatggagggggtcagtggcaaagagaaaaccttggggcaggtgagatgatgctggggaagggaccccagtggtgtggatgtgacactaggccatagaggactcaatcaataagaaaggaaggatttgcagtgtcaggggttccagacacaggtgaatcttgaagccaggtacagatgaaggagattgggaaaagtttccagccactgggtaggccaacccaggtgccagggacaaagaaccttggtcttggggctgggcatgatggctcaagcctgtaatcccagcacttaaggaggctgaggcaggaagattgcttgaggccagaagttcttgagatcagcctgtgcaacataacgagacttcatctctacaaaaacaaaaaatcagctgggcttggtggtgtgtgccggtggtcccagctactcagaggctaaggtgggaagatcgcttaagcctaggaggtcgagaatgcagtgagttatgattgtgctactacactccaacctgggcaatagaatagaactctcttctcttgggctcccaagagctctagcggggagtgaccacacatggttgctgagcactgtgacagctgccatgagaccggctgaaaagaggtattagttagctatagtcccagtagaactacctaacaaggcacccccaaactcagaggtatacaacaacaagcacttctttctcacacttacgtatgcaggctggctgaagtccagctgatctaggctgggcaggctgggctcatctgggctcaactaggcttggctgcaagtcgtggattggttcagggctactccatatgtctttcgtcttccctggcatctctgacacatgttctcagggccgtggcagaagcaccagagcacaagcccgaccacagaaacactttttagagccagtgctcatggcatttattctattgggcaatgcaggtcatgccgtgaaaccccacatcaaagggcagggaaatatgctctgcctctacgtggggaactgcaaagccacatggcaaagggtgtggataaatagaagggtaaagaattgaaggtgggtaacatgaccaaggtgattctaccagcatctccaggtggtgatgaaggctccagatggactcccactaattaagctcatgcaactgatacttaaaccagaaagtcaccttattgatctgcagctagaaatcttagtatattgcagactagaaagctcctgtcatccgctcagtgtattcttttcagtaggaaattaatgtagaacatcaagtcataattccagctttgcttatgaacatggagagcaagcaagaagcattggttgggcgatcctaaaggcttgaattatccaggtctcgttgcctgaggcctccctttccactacaggaaaacacctgccaaagggatagtgggcaggctgctcccttgtttaggtagagaccttgccaaattactctttgtatgctcttttctagcctcctctctgatcattcttaatctacattagtcctttacatacaaggtaataatgaaattattattctgtgactacaagccatattgggaattaaggtctctaagatgccacagtcacctagtcacttaagactgtcgcttaggataaggtgctttacatattcatcaatatctcttaaatagcaatggatatcatttgccatccttttttttttaattattatactttaagttctagggtacatgtgcacaacgtgcaggtttgttacatatgtatacatgtgccatgttggtgtgctgcacccattaactcgtcatttacattaggtatatctcctaatgctatgcctccccctccccccaccccatgacaggccccagtgtgtgatgttccccttcctgtgtccatgtgttctcattgttcaattcccacctatgagtgagaatatgcggtgtttggttttttgtccttgcgatagtttgctgagaatgacggtttccagcttcatccatgtccctacaaaggacatgaactcatccttttttatggctgcatagtattccatggtgtgtatgtgtcacattttcttaatccagtctatcattgatggacatttgggttggttccaagtctttgctattgtgaataatgctgcaataaacatacgtgtgcatgtgtctttatagcagcatgatttatactcctttgggtatatacccagtaatgggatggctgggtcaaatggtatttctagttctagatccttgaggaatcaccacactgtcttccacaatggttgaactagtttacagtcccaccaacagtgtaaaagtgttcctgtttctccacatcctctccagcacctgttgtctcctgactttttaatgatcaccattctaactggcatgagatggtatctcattgtggttttgatttgcatttctctgatggccagtgacgatgagcattttttcatgtgtctgttggctgcataaatgtcttcttttgagaagtgtctgttcatatcctttgcccactttgtgatggggttgtttttttcttgtaaatttctttgagttcttcgtagattctggatattagccctttgtcagatgagtagattgcaaaaattttctcccattctgtaggttgcctgttcactctgatgatagtttcttttgctgtgcagaagctctttagtttaattagatcccatttgtcaattttggcttttgttgccattgcttttggtgttttagtcatgaagtcgttgcccatgcctatgtcctgaatggtattgcctaggttttcttctagggttttgatggttttaggtctaacctttaagtctttaatccatcttgaattaatttttgtataaggtgtaaggaagggatccagtttcagctttctacatatggctagccagttttcccagcaccatttattaaatagggaatcctttccccatttcttgtttttgtcaggtttgtcaaagatcagatggttgtagatgtgtggtattacttctgagggctctgttctgttccattggtctatatctctgttttggtaccagtaccatgctgttttggttactgtagccttgtagtatagtttgaagtcaggtagtgtgatgcctccagctttgttcttttggcttaggattgccttggcaatgcgggcccttttttggttccatatgaactttaaagtagtttttcccaattctgtgaagaaagtcattggtagcttgatggggatggcattgaatctataaatttccttgggcagtatggccattttcatgatattgattcttcctatctatgagcatggaatgttcttccatttgtttgtgtcctcttttgtttcgttgagcagtggtttgtagttctccttgaagaggtccttcacatcccttataaattggattcctaggtattttgttctctttgaagcaatagtgaatggtagttcactcatgatttggctctctgtttgtctgttattggtgtataagaatgcttgtgatttttgcacattgattttgtatcctgagactttgctgaagttgctgatcagcttaaggagattttgggctgagacgatggggttttctaaatatataatcatgtcatctgcaaacagggacaatttgacttcctcttttcctaattgaataccctttatttctttctcctgcctgattgccctggccagaacttccaaggctatgttgaataggagtggtgagagagggcatccctgtcttgtgccagttttcaaagggaatgcttccagtttttgcccattcagtatgatattggctgtgggtttgtcataaatagctcttattattttgagatacgtcccatcaatacctaatttattgagagtttttggcatgaagggctgttgaatttcgtcaaaggccttttctgcatctattgagataatcatgtggtttttgtctttggttctgtttatatgctgaattacatttattgatttgcgtatgttgaaccagccttgcatcccagggatgaagcccacttgatcttggtggataagctttttgatgtgctgctggattcggtttgccagtatgttattgaggacttttgcatcaatgttcatcagggatatttgtctaaaattcactttttttgttgtgtctctgtcaggctttggtatcaggatgatgctggcctcataaaatgaattagggaggattccctctttttctattgattggaatagtttcagaaggaatggtgccagctcctcctcatacctctggtagaattcagttgtgaatccgtctggtcctggactttttctggttggtacatttgccatcctttgatggcaacttacaaccccttctgaccatgtagtcatcaagtggttgtcatttcctgaatgtgtacaagtttgcaactggacatcctgaagtttccatcaaccaaccatttaaggagcatttaaggaaggaatatgagtctttcactgacctcttctgtaaaatcaagaaaacaccaacaagagactggcaaaactgacaccggaggcttgggggaaaaaaatcccagagacaaaaatgaaacatcttggccaggcatggtggctcacgcttgtaatcctagcactttgggaggccaaggcgggtggatcacaaggtcaggagttcgagaccagcctggccaacatggtgaaaccctatctctactaaaaatacaaaaattagcagggtatggtggcaggcacctgtgatcccagctactcgggaggctgaggcaggagaattgcttgaacctgagaggcggaggttgcagtgagcagagatcgcaccattgcgctccagcctgcgtgacacagcaagactccttctagaacaaaaaaaaagaagaaaaatcttttaagagacgctacatcatgaatgtccttgaaagatcataccctgtatatgaaagaactttagggatatcttaattaattaattttgcttttattttccttgtaatgcgcatgggaaaaactgtgcatgacgacattctgtgtctaaatatgattttagggttttaagagttatttcaataagattaaagtaaattctaagagataagaaaataaattcagcctggtcaacatagtgacaacccatctctacaaaataaatttaaaaaataattttaattagcagtagttgggcatggtgacatttgcctgtagtcccagctactccagaggctgaggtgggaggatcgcttgagcccaggagttcaagactacaatgagtcacgatcatgtcactgtactccaggctgggagagagagtgagactttgtctcagaaaaaaaaaaaagagagagggagagaaagggaggaaggaaggaaaggaagggagggagggaggatggaagaaaggaaggaaggaaggaaagaaggaaggaaggaagggagggagggagagagatattgccatggtttaattggcaatgtctgtttcattagatgatacataaaataatgatgtcctttactattgatggaggctcaaatgctattaaattttgtatttctccactggagcattccagcgactggtcatcagaaatggaactagcaccatgagcgaggtagctttggctgtgaactgattccaaatcttgcaacgtggccagtagtaaagaaacaagatgagaggccactttttatatggctttttaaagcctttatatatacatactggaatatcttagccagtatcccccctcattttttaaaaccttaattttattgagatataatttgtatacagcaaagtgcaaagtcttaagtgtacagcccagtgaactttaggcagagaccccggtagccaccatccagatcaaggtctagaacattttcattatcccggatggtttcctgtccctttcctagtcaatgcctccctaaacaagaatacccattattctgttttctattaatagcaatgtagattagttttgcctgttattgatctccatatatatggaatcaaaatgtatacacctttgtgactggcctcttttgctcaacataatgttttgagcaaatgcatccacgttgcttcatatatcagtaatttgttcctttttgttcctgggtacttatccattgtatgaataatacaatggattcattgtattattttcatattgatggatatttaaattgtttctagtctggactataatgaataaagctgcaatgaacatttctgtacgtgtatctttttgtagacacatacatccatttattttggatgtataactaagagtggaattactggattatagagcaagcatagatattagtagattattccagctttctaaggtagttggaccaatttttattcccaccaacaccatatgagagttccagttgctaacacttggtatgatcagtcttttaaattttacttattccagagggtgcatgggagtgtctcaatgtggctttaatctggattttcctcactggatatggtggtacacacctggaatcccagctacttgggagactgaggtgggaagattgcttgagcccaggaatttgaagccagtctgggcaacaaagtgagaccctgtctctaataataataataataataatttggattttcctgatgagtaataatgttgaacagtcttttgaatgttttaggtttgaatattctctgtagtgaaggctccatttaagccttttgttcttttgaaaatgtgttttgtcttccttatatattctagccagaagttatttgtcttacatgtgcatttcaaatatcttctcctgctctatgtcttattcattcactttttaatgatgtgttttgttgaacaaaagcatttaactttaatgaggtccaactcatccctttttatggtctgtctttttttaaaaaaaaatattaagatggcttgagttttttatgtcctgtttaagacatttttgcctactccttgtttttctgtcttacaacccctgtttcttttgccagtttaattgcctgcccttttcttgagtggggagaataggaatcaggtcaggctacatctgagtgaggaaggaagggtgacagagttaaattaggaaagcgaggccaacaaattaggggaatagattgaagcaggaagaggcccaacactgtctgatttttggtctaagggacctgaaagcctttgagtctgggtaacctgataactgacttcagtgctgtccagcccaaatatctgcattgcgtctcttagagtgtttggagaagcttgtcaaattttatgaaatcaacctcttccgtgctcacagccctgatctattgcctagaaacatgaaaaagttaatgaagttcgtgttttaaggacatcgtgctaatgtctagagaccatcattttccttctaagtgctcaaaaaccatcttgataatcccttcttgaccatatccaggaaatgaaacctccatttggaataatatttacttattcctaatcctctgactccttccccattctccataagttttccttacttactaaagatgtcaataattccatgatctcatctgtcttcctacaatcaagggtaaatgtttgggtctgcttttcataaagagaccctggcagggcctgaactgagctgaccatgtagtggagaccagaacaaagcaggagttggcagggggctcgggacatgcagggagaaggcgggactgctgcaaacacggtggaggacagaatacatttcttaaagtagcttcagattaggtagcagcaactgagttgagatccctgggctcagaagatggactctggagtccatagggctttcttgggaagataaacagctctacagggagaaaatacttccatgccaggcccttccagggggtcatacttagaatgttgggactacattgatgaatcagagtctccttagaggcactaattggcaggaacaagatggggaggagccatccaacttccagggatgagctggatgagggcaggcaggatgtggctgcagagacgcccctgggcgtccaccctcaggcacagggaaagggagtatggtgtaatagaaagagaggactgctgggattcacacattcctggttctaatcctgactctaccacttattaattgtgtaacattaggcaagaatagtgcttccatccgaagattgactagagggtcaaataggatactgtgcataaaatgccaatttccccattttcctcccatttctttggctcttccttctggttgctctacccaacagacagctttcaattcttatctttcttgcccactttgaagcactggcaccattaaatagtcacaaggtcttgaaatataactttcccttgacttccatgaagatcccatctattccatgacagtagctaccatgtgcatgctgacaactcccacgtgactatctccgcacataactccttcctaagagccagatccattgatatacctgcttcctgaactttccacatggatgtcctactgacagctcaaactcaacaattccaaattcagctcattatcttttccataaatctttcccttcctcacctgcgttctctatatggagaatccagtcatcaagcccaaaacttgggagtcatggattcaagtgcaagtggtttatttgggagatgatccccagaagcatcactgggggatcttggaagtgaaacaaggaagggaaggaagccagtatagagtgttttatcaagcctggcacccctgtggacaactggaactgaatcccactgaaaaacttggagatgctgtagagagcacaagcttcagagtcactcatcccaaggtgcaaaggagctgggtgtttatttgccaactcctgccaggcattggcttatctctgtcactggctgccccttgcacttctggccttccataggtgtgatagcattaggtcccaccaccagagaaaaccctcagatgaagtggcacagatgctgatggttggaagtcagaaatggaactcctgactggtgccaagagacatcctgtatcgggtctgcccctttacatgggtgattcttgtttgtttgtttttttgttttgttttttgttttttttctgagacggagtctcactctgttgctcaggctggagtgcagtggctcgatgatctcggctcactgcaacctccacctcctcaagcaactcccctgcttcagcctcccaagtagctgggattacaggcacacaccaccacacccagctaattttttttgtatttttagtagagacggggtttcaccatgttggccatactcgtctcgaactcctgacctcaggcaatccacccaccttggcctcccaaagtactgggattacaggcatgagccactgcacctggccggttaattctaagctaattttcagattgcctagttgtcttctcctcttgggacccttgtgtttctctcacactcactccccatggagtctggatggtgtgcccctctctctctgttttagcactgataagcttgtcttttaatggtttcttatttaattatgtccctcactggactatgagcatattcagaacagaaaccaaactctgattcacctttacatccccatagttgagttaatgaatgactaagtgaacgaagaaaaaagccataaaagaggtggcacagcacataaccaactgcaagtttttgcagataacccaggaaagtagcaaattaaagccagggcaaagaacacccttctttcactattacaaatcctatgataacattcggtcaggtctaaacccacagccagtctttccttgttaagtttagggttaacagttccccttatgactttatgaggtagaaaatattcagcagagtcaatcaagaatgtgtcaaatgtcctgctttgatcagtctccgggcagatgtcacactattccttctacccttcttgatcctgtccacctcctaaactcctattcttcctttaaagcctgtctcaaaagtcccacctccttataggtttccatgaccctccaacctctagagaaaattgatttctgcccagctgcactctactgtcattgtcagcctttgctatgatatgttccaccacagcccttccccttgacaaagattcttggcttgacgaaactttagtcaggctcctgaacctcctcctaggtgcttctgagcacttccttataaaatctagttttaacaaagaaccctgctaagtaggttgagcaagaacgccctgccctcgatatctgatcaccctccatatctgatcaccctccatatctgatcaccctccttatctgatcaccctccatatctgatgatcaccctccatatctggtgatcaccctccatatctgatgatcaccctccatatctaatgatcaccctccatatctgatcactctccatatctgatgatgaccctccgtatctgatcaacctccatatctgatgatcatcctccatatctgatgctcaccctccatatccgatgatcaccctccatatctgatgatcaccctccatatctgatgatcaccctccatatctaatgatgaccatccatatctgatcattctccatattcaatgatcaccctccatatctgatcaacctccatacctgatgatcaccctccatatgtgatcaccctccatatctgatgatcaccatccatatctgatcatcttccatatttgatgctcaccctccatatctgatgatcaccctccatatctgatgatcaccctccatatctgatgatcaccctccatatctgatcaccctccatacctgatcagatttcttcactgccactatcccccaagtggagtccggccatcctggcctgtcttcagcaacctgctaggttggtttagccagagtctcctgaccctgatgtttcctcttggtaatatgcatatgatacataaacagttatacaatagatatccatggtattaaaatttaatggaggccccatccactgtccctccactcttctccttggctataaattcccacttgtccatactgcattcagagttgaacttggccgggcgtgttggctcacaccagtaatcccaccactttgggaggccgaggcgggtggattgcctgagctcgagagttcgagaccagcctggccaacatggtgaaaccctatctctactaaaaatacaaaaaattagtcgggcgtggtggcaggcacctgtagtcccagctacttgggaggctgaggcaggagaatcgcttaaactcgggaggcagaggttgcggtgagccaatatcgtgccactgcactccagcctgggtgacagagtgagactccgtctcaaaacaaacaaacaaacaaacaaacaaacaagcaaaaacagagttgaactcaatctctctcctcaaccacccattgccacggactgaataaagtctgtcttaccaggcattaacaagtatcattgaataattttttctttaatgctctttgtagactatgagttcttcaaagttagaaccagggctggtcttagtcatcttggtgttcccagtgcttgggagcacagtccctagaactgaatccttgccaaatgcacgttttctgagttgaatcccctttcactgcaagatcttgtctttggattggtttgtaacatgacttaatgtagcaacatctgccctccagcgtggagccagcagacttgtaccatgttcctccctcttggcatcatctacttttctctcttctttcaccctctgctctgtgcctacccttgtcctctcaacttatgtgtttacctaaggtgagcgttttctcatatacatcttattgctttgtcaaatcaatctgaataggaaaaatcaagaggaacagcatgtgtgtgcaagaagaaaggcagtatacatgtgcagcctgtcatttatgcatgtggcctctggagtcagcacttgtcacttccacttactccctgttgactttaggaacattatttaacacgttttgtctcatttctataacatttgcagtgattaagggctcacctgtcatagatgttgtgcgttacatgaaaccatgtatgtgcctcacccttctgccctgggccttatcattgcagctcacaccaacttgactgctggctgcttgcatttgcatctgtctgtctagagagtactggggagttaatgtccccacaagcagccttcaaccaatgactgatggaagtcagctgtatcagtaccccagctccctcacccccttcagaagggataactctgaagcttgtgtttgacactgcttaccagcattactctgtgagattaaactccatttgtccacagctgtcaatggcttgaaaatcatcctcctctttcctgcctcactttcccattcacctatcagtatttctcaggaccactttcccagaaattaccagccctagaatccttgccttggggtttgcttctgggagaaggcaaactttgacagtatgtaaagtgcttagctcattccttgcatctaggaagtcccagaatggttgtttctgctgttataaaactgcggttcatcggtagaaagcaaagatgaccatagatgggagaggtcattcccatcctgtgttcatcttcacactgctctgggaaaccccatatgggcattgccaggctgtgagagcacagtgaataatggtcagtttacaacacgcattctcaacaggggctagattgcccccaagaaggcaagaattggttctcgggggtgggtggtaaaaaaaaaactttttttttaatgtataagacacagatatgcatatgatacataaacagttatacgatggatatccatggtattaagatttaatggagggatcaattagaaaaaagggtctgaaaaggctgggaaacaatagtttgcaagaggcgggagaagttactattgacagtaccctggtttttgaccatcctgggtggcactgtttagtttgcagggtcatgtcctcttctggagtgaggagttaacagctgaactttcataaagttgtttggttaagtttgccccacagggcacaagctttttggcaaaacattcaactgtttgtggttaggattttcctggttcttattaacaccagacctggttacatttagaagatcatgacgcttggctctataaacaaaattaccaggtcgtgaaacacagcatcctttgaatccttccttcctgacttcaccaaagtccctcctccaaagcagacagcatggaatttgacaagaagaaaaaaggaccaaattatttggttccaatacacttctcctttgtcaaaatatgatcatttaaaagtttaaaaatagagccctcctattgacatataaggagcgtggggttaaagacttattaggaaggcatcagcaggtgggtaaagctagttcaaagcaggatgggtacaagagattggtgtatatgtaatcagtctaaagaaatcctgctgaaataggctacatatactcgctgcctgtgatacaaaactggttaccatcctcaaagggccgtcaaaccatcatctttggagttgttctctaccagacaaattttatttgtaaattatatttggatgattctatttgggcattttggaccatttttttaagatcacctaaattcaccttaacactttctatagcattcaagctaggatatgaaatcttaacaagttttatttcttcattttctcttttaagtatctgaaagactacctgaaaaacctgaattagcttatcccttttacatcaaagatgctggggagcaaggtgcagacaatggtttgctgtaaatgtttacgactcccccagatttagtacttgccaatttccatggtgtaaataaatactccaaccataatcatcttcaaattactaacagaatgtccttaggcagagttaaggagagatgctcaccgtcaccattgtgagatggcatattttggtcccagcatgtcatcaggtgtgtgctatgacatattttctatacagtatagtcacaacattcaggttcctttctgaggaggtacactcaggccactgggtaaatgcctctgaagagccagaaagatcagctcagctaaataaaactgcccaataaaactgtattccctggaaccttaatacataccctgaggggtccttcagggattacacaattttaaattcaaatttcattttaaaagttatactttctttctttttttttttttttggcaacagtgtcttgctctgttaacccaggctaaagtgcagtgctgcaatcatggctcactgcagcctcaaactcctgggttcaagtgatcttccctcctcagcctctcaaaaagctaaaactataggcacacaccaccaggcccagctaatttttattttttattttttgtacagatggagggtctcactttgttccccagcctggtctcaaactcctgaccttaagcaatcctgctttggcctcccaaagtgctgggattacaagcatgagccaccatgcctgaccaaaagttatactttacaaaaatataataaaaatatacacatacatacatatgtagcaaatgtataaaggtgcatttgcatacatataatagaagtggtccccaacctttttggcaccagggaccagtttcacggaagacaatttttccatagaccggggttgtgtgagggatggttttgggatgattcaagcacattacatttattgtgtactttatttctattattattacattgtaatatataattaaataattatacaagtcaccttaatgtagaatcagtgggtgccctgagcttggtttcctgcaactagatggtcccatctgggggtgatgggagacagatcatcaggcattagattctcataaggagcacagagtgtagatcccttgcatgtgcagttcacaatagggtttgtgctactatgagaatctaatgccactgctgatctgacaggaggcagagctcaggtgataatatgagcaatggggagtggctgtaaatacagatgaagcttcactgcctcactcactgctcacctcctgctgtgcagtcttggggggtgggggacccctgatatataggactgatgaactccaagttcagaattcttgtaacctctgaaaagaaaaaggatatatgatagacaggactccacagggctggggagtgcagagagacatgttacatctttaaacctttttgtatatctttaacattgcatacaaaattcacaaaacacatagccatatatgctttttatatcaaatttcaagcttttaaaaaacattaacgtgaaattgtgtttctagattaattttggatattttattttattttatttattttgagacagagtcttcctgtgtcacccaggcgggagtgcagtggcatgatctcagctcactgcaagttccacctcccaggttcaaatgattctcatgcctcagcctcctgagtagctgggattacaggcaggcaccaccacaccagcataattattgtatttttagtagagatggggtttcactatgttgaccaggctgatctcgatctcctgacctcaagcgattctcccgccttggcctcccaaagtgctgggattacaggagtgagccaccatacctggccagattaatttatttttcaacacacatgttagtgttttgctgtgcgaaaacgttaaaccatcactaagaatcttgtttatttttatttttttttttgtttaatggaatgcatttttacatttttaaataatttcaaatttacacaaagtttgcaagtatagtacagagactcataagatgtcagttatccagattaacacattttaacattttaccatatttgttttatttctcttttttacctctcactccacacacaacacgtgcacacatgctcatgtgcacacacacacacttttttctaaaccattggacagtaagttgcatgagtcacgcctctttaccactcaatactttagtgtttacttcttaagaacaaggacatatttttacatcatcacaatccagttaccaaattcaggaaatttaacattgatgcaatactttaatctgttgcccatatttcagtttttccaattatcccaataatgtcatttacagcattttttttcagttaagcatccaactgaggatcatttattgaattgagttgtcacttctgtttagagactccttcactctgaaatgtatccttagcttttgttgccttttaagacctttacgtttttagagcatgcaggccaatcatttttgtagagtgaccctcagtttaggtttgtctgatgctcctcacagtagattcatgttttgcacccgtggcaggaatgccccagagtgatgcggtggcctcctcagtcccagatatcaggaggcacatgtggcaggtttgttttattcctggtgacaccagctccaatagtttagttaagatggtggtgtccaccaagtttctctgcagtgggagaattttaagagttgtggtttgtctaaaactgagagatgaatcaaactgggagggtatttagactttgctggatgatggccccaaagctgctctgaaaatgctgtgcagctgggtgagccggcctgctctctgaactgcaaggcgttttcgtgggacaagaaagggcagcatcagcagcctgttctgtggctggggctgcaaaagccatcagtgtcgtcatgtctggcgtggggcatgctggtgcacaaagagccgaaccaagctccacagcaggaactgacaccaagccaggccccaaggaggcctgtgagtgtggccagttccctgctttggtgacgtgatatttatgcaccacggctcttctgaggtttctccaactttcccatataaaatgaagatggcctttcttctgagccagggctgcccaagtggcaggccacaaaccacgcatcgcctgacccaggctggggcagcagcgtctcggagaaaaacaggaaattgggacatacgcgctttccaccgcctggctacgttatgagtttcttagtggttccatgtggcttgagtaacagggtaattttccttaatgcagtaaaatacccaaaggaatgaagatgtattttattggacaacgttttattttagtaaattatttagtgtccagcactgtttgaagtactcttacagattcgctcctgaattcataccacacactttcactgggccaggaaacacgtgaaatgagcagggcaggtcttagggtttcatccgggttttatgatatgctgggcagaccgtgaacattcgacaacaggccgtgctccatcctgtaggggcacacagcctatgtgagataaacagacagctataatcatgatgttgtggaggctgtcagagggaccttggggacccagaaaggggaagggctgataatgggaataggtaatgaagggaagctagcacagagatgatctctgacctaagtcttgagggataaaaaggtgttcactagctgggcatgctggctcacacctgtaatcccagcactttgagaggccaaggggggtggatcacctaaggtcaggagttcaagaccaacctggccaacatcgtgaaaccttgtctctactaaaaatacaaaaagttagctgggtgtggtggcatgtgcctctaattccagctactcgggaggcagagacaggagaattgcttgaaccgggaggtggaggttgcagttgagccgagatcacgccactgcactccagcctgggtgacagagcaagactccgtctcaaaaaaaaaaaaaaaaaaaaaaagtgttcaccaggtggtgaggcattttaaacagagactgagtgatgtatacagaaacacgcagggtggatgagtctgcgctggagagagggattagaaatgcaaataaaggtttgaatgaaattgatgaagaccatatacgctgtggcagagtttggactgatgtcagggccaccttgattagattttgtgttttaggcaggatttcccaaacttgagaggaagggtttctggggaacaagaccctcactattccttcagaggttactgacttttgtgacatggtgaggtggggagacgaagccacgtcatcactggccacactgaagatgggttagcactgaccccagggaagggccaaaccaagagatagaaaaagctggggaaatggggcctggttgaattgtggagctgctggattggcccatgccactccatgaagcctccaccctcaccctggactttaggccatcccttaatcacttttactgcttagagatttttaagcttttattttgttcttgggtttttttttttttgagagacagggtctcgctctggggcccaagctggagtgcagtggtgcaatcacagctactgcagcctcgaactcctagactcaagtgatgctcccacctcagcctcccaagtagctgggaatacaggtgtgcaccaccatgcctggctaattttatttatttatttatttatttatttatttatttatttattgtagagaagggggttcgctatgttgcccagatgacagtgctggacccaagcaattctcccgcctgggcgtcccaaagcattgggattacaggcgtgagccacctcacggggccaagttattttgaaataatgtcaaacttccagaaccgtggcaagaatagttctgaggactcctctgtactatttgcacaggttcactgacctgtgccattttgccccatttcctgtatcagcctctgaaccaggttagagtagattgtagccatcaggccccttcaccacttactgcaccagtatatacttctgaagaacatggaggttctcctacattcccacagttcgatgacccaagaatggagcctaatcatcatatgatactttgatctaaacccgagatgccaattgttatcatttttcccaataatgtcctgtatagcatgtttctttctctagtccaggaactagtccagatcatgtcttttgcaggaaggtgtcaggcctctttaatcttttttaagagtgattcctcaggctaggtgtagtggctcaagcctgtaatcccaacactttgggaggccaaggtgggtggatcatataaggccaggagttcaaaaccagcctggccaacatggtgaaaccccatctctactaaaaatacaaaaattagccaggcacgatggtgcacgtctgtaatcctagctacccaggaggttgaggcacgagaatcacttgaacccaggaggcagaggttgcagtgagccaagatcgcaccactgcactccagcctgggctatagcattagactctttcaaaaaaaagaaagaaagaaagaaaaaatggttcctcagcctttctttgtttttcacgacattgatattgatgtagaatctaggccagttctatgatgggatgtccctcagttggagtgggtatgatgtttcttcttgatgagattccacatacacactctctgttgtaatatcctctaactgatgctgtgttcttctagggcatcacgtctggaggaacacagcatctggctgccttcgtttgggatgctgacttggatcacctggacaaggtgttgcctaatttctccactgtgtagttactatcggtccccttgcaactaacaaatactgtttaaggagatgttattatttatcttcaagccaatttgaatggggttttctgttacttccaacataaaaattcctagctgattcaagggctcatttgtattgcaggattgattgctgattaccatggagaagcaggcaagggattatgaagagaaagacaggagggatatcttaaaagctttcattgtggtctgatgggagcagatctggaccaaggcacatggggatcctaagaggactaattcatttggtgacacttctttttctttgaatttattttgcaagagctgaacaacaacaaaaatgatactctcgccaggtaggtggctcacatctgtaatcttactttgggaggccaagacggggcttcactttgaagccaggagtttgagaccaccctgagcaacaaattgacacccagctgaagcttcatctcatgaggtatctttgggagacagtatatatcgtgcacctcagagatgtcctactaaaatgagggagcagggttgaggtgagaaaaatcactgttgctagtaaatagcagtgcatcatgcactatgtggtttcagaatttcctcttcctcagactgccaacttaggtcacacattctagctgttctaggttggcttgttctaggtttggctgggagttagggcatgcattgccacgtgtcaaaatactcaacaaagatagatcagtgctagtgaggattgtttcctatctccacttctgtggggtctctactctgaaggaggtagaaccaatgtacgcatcgcggcttctctaaggaatcataggcaggaactctgcctaacagggactatatttccagttaaaaatgctgaaatggatccccagtttatttcaatgatgtttatgaggaggacgctaagatttaggaattgtggactcttaagttatttcactggttcaataatggagttagatcattatgggggcagtgctcagggaaaagcccatgaacagggtgggtgatatggttaggcttcgtgtccccactcaaatctcatcttgaattgtaatccccaggtgttgaaggagggagctggtgggaggttattggatcatgggggcagtttcccccatgcctagtgatagtaactgagtgctcacgagatctgatggttttataagagttcagaagttcctcctttttcactcgtctctctcctgctgccttgtgaagaaggtgcttgcttccccttccactatgattgtaagttgcctgaaacctcctcagccatgaggaactgtaagtcaattaaacctctttcctttataaatgacccagtttcaggaagttctgtataatagtgtgagaatggactaataccatgggcttgagctagtctttgaagaataggcagaatttggatatacgaagtagggaaggtgtgggggcactggtccaaatgcaaaggtgggagtggggataaaatatggataagatgcatgtgcgattgtacctcgctcacttcctcctaccatacactcctatgcacgtcttactgcaactttctgcctggccgtctgagggtgccatcaagttaatacgcccaggagcaattctccaacagtgacctacacaacccagcttccttgacctcaagtgggacacccctgaagcacactcaccccacatcatctgcactcccctgcagcatcatgctctggtggcccccagctatacatgttcagtcttaaaggataaatattctaaaggtaaaatcatgacattaatagaaaactttttaaaaactacatcagagtgaaatactggacattggaaactacaaaatgtgggacgctgggtagggagtgagggttgaaaaattacccattgattatgatgctcactattcaggtgatggatatagcagaagcccaaacttcaccactacacaaaatatgcatgtaaggtacctgcacttgtactctctacatatatttaataaataaattaattaaatgttttaaaaactgcttaaaattttttaaactcattagtgaatgagggaaatggtaaaatgtcacaactgatttaaacatagactcaaatagcacttacatacaaatatataacacactttttctttttttaatgttttattttattatttttatttttattttattttatttttgagacagagtcttgctctatcacccaggctggagtgcagtggtgcaatctcggctcactgcagccttgatctcctgggctcaggtaatcctcatgcctcagcctcccaagtagctgggactacaggcatgtgccaccactcttggctaattttttaaagttttttgtagagttggggtctcactatgttgccaaggctgctcttgaactccggggtcaagggatcctcctgcttcagcctgccaatgtgctggaattacaggtgtgcaccaccatgtccaaccatgtaacacactttttctggaaaggaccagataacattttagggtttgcaggccacgtagtctctgttgcaactactcagttctaccactgtagcctgaaacagctatagactatatgttaataaaggagtggttgctggtgtttcaatgaaactttattctcaaaagcacatggtaggtgcatttggcctagagaccttctttgcagacccctgatacaggcaattaagaaccctgaaattgctttacaagtggatgcaaaactggtcaatatccacagggcactaatcaagtgcatctccatagaaccgaatttgcatctctgtgggcaacattcatctgcattattatgagttttctacaatttacagaattgaaaatacagttgatcctcattatttgtgaattctgtatttgcaaatttgccttcttgctaaaatttatttgtgactcccaaatcaataatcatggtgcttttgtggtcattcgtgcacatacacagaggagcaaaaatttaaatcacctggcacattcccagctgaggatgaatgaagctctaccttcttgtttcagctctcatactgtaaacaagtgtcctttttgatgtctatttagtgctgcctttttcacattttggtgtgtgtgtgtgtgtgtgtgtgtttgtgtgtgttggttatttcactgctttaagaggcccctaaagtaaatgccaaacaactgtttaagggcaagaaggctgtgatggagaaaatgtgaatgttagataaactctgttcaggcttgagttatagtgctgttgactatgacttcagtgtcaatgactcaacattacatattaaataaggtggttttaactagaaacacacataaagcaaggttatgcattgatctgttaatgaaaatgctgtgaccaggggctagcaggaacctaaactggtatttcccctaggaacaatggttcagtgttggctaattcacggttggtgatgactttacagaacttaataccatgaagtacaacaattgattgtggctcaaagaaagacagtgaaaggtggagctaacccagaagggtgctcaagacagcacaccccgtcattatctcataatgcttcctggtgtcagtaatgcacctttctttggctgccttctcttccctgactccctcacagtacctgtctccttccctacagtgtttcctgtgactacctctgaaggaaacaatttgcacagcaatgcttctctcagagttggcttccaggggaatggagactaagacaggttacactgagcagaggagtgtaatgagagttgagggtgtagagacataattagcaactgagattgaatagttgagttggttgcagagcagaaggggccctaaagagggaatatagatacacttttatttttaaaattattttattttattttattttattttttattttttgagacagggtctcactccatcacccagactggagtgcagtggcatgatcttggctcactgaagcctcctcctcttgggttcaagcgattctcatgcctcagcctcctgaggagctaggattacaggtgggtgccaccatacccagctaagttttgtatttttagtagagctggggttttgctatgttgtccaggctggtctccaactcctgacttcaagtgatccacccacctcggtcccccaaagagctgggattacaggcatgagccaccgcacccagcagataattttttttttttaaacggaggcttactctgttgctcaggctggagtgcagtggtatgatcttggctcactgcaacctccacctcccgggttgaagcaattttcctgcctcagcctcccaagtagctgggattacaggcgcacgctaccatgcccggctaatttttgtattttcttttttttagtagagatggggtttcaccatgttggcgaggctggtctcaaactcctgaccttgtgatctgcccacctcagcctcccaaagtgctaggattacaggcgtgagccactgcgcccagcctaaatttttaaattctaaaaagatgagttaactggatgtggtattgcacacctgtagtcccaaaggagtctgaggcgggaggatggcttgagtccaagagtttgaggctatagtgagctatgattgtgccattgcagtccagcctaagcaacagattaaaaattaaactttttttaataaataaaaaatgggttgcaaacagggaagcagaatgctggtgcaggcctgcaggatggaatgaaacagacacagacagtggtgatgcagacatttaaatcactcaacacgttcccagcagaatgtgtcctttggtgtgggcctgcaggatggaatgaagcagagacagacagtggggatgcacagacatttaaagagctgctgaagccattagggtcggcgcagtccaaggcctgagtgagtgcagaggatgggaaggaagatgagtgacgtttcagccagaagattcagcagaactgcagagtgactgatgtgaggaggaaagtaagggcacagccggggtccctccctctgaggctttgagcctggggttgtcattaacagaagagggagcgaggacttcaggggaacggaatgtgaagtggaaagtctgcactggaagctaaatttcagagagagaaaccaaaaatgactgcttctcgtacttttttctagacagatatttctgagtataggaaaagaggaagcagactccacaaacccttggcttttgtttttgttttatttttatttgatccaggcaaagtaagtagttgcaatccagaaataatgcacagctctgccaactgaaagatctgacttctatcctctggtttatcttcaggtcgtataaatcttttgccttcgactgaaagatttgatttctgtctactctctgtgtataccccaatgagataataaaggggtagactataattcaaaaaaagggaagaggagagaaaaggaaagactcctaactaagagaatagggcttaactggaaaatagggcctatggagaaagccttggttaaaatggaagcttccagatgtagggagggctcatgtagagagaggtgccacacagactatgatggcataacagacaggcgaaatggggatatgtgagtaaaagccctttataaatcaaaataccacataccggctgggtgctgtggctcacgcctggaatcccagcactttgggaggctgaggcaggcagatcacttgagatcaggagttcaagaccagcctggcaaacatggtgaaatcctgtctctactaaaaatacaaaaattatctgggtgtggtggcgggtgcgtgtaattccagctactcaggaggctgaggcaggagaatcgcttgaacccagcggggcggaggttgcagtgagctgagatctcaccactgcactccagcctgggcaatagagactccatctcaaaaaaaaaaaacaaaaaacaaacaaacaaaaaaaacaaccacataccaagtgtactggggcattcattcttttacagccagacccacccatttggattaggccagtcaggactgcgaagaggtcagtttggcccagtttgctttactgatttcagcaaaagcacttacagccttctggaggagagtaagaagataaggtcttcaggaagataaaagcattaacttctaaccttcccccttgctggagatgctgttacaaccacccaaagagagggatgccttgttttaccaagaaactcagcttctgggtgattctcaggcatgttatctgttttcctattatctgcagtaactcgaggtcaatggatgctgattgcagagggttcataacattaccccagccccagagaaagtgtgcatatctcagacacaaggcagaggtatttttcagtgcttactggatgtgttttgactcccaagagaagaatgtttggaggggaaaggcatctggtttggaactgagagcgaggtttcagaagtctaagacagtgggtccatagtgcagggttatagtgttgtagactcaccccgtgaaagagccataaggcagaggaaggagcacaagagccaggatgcttctcaggagagagtctgacctctttgctggaattcagagctagagagaaattaggttgcaatagggctgttgaacctaagcccacctgctttctgcaagtgccacaaggatgtaactaggcccacacaggaccgaaccttatacttttgcaaaccaggattggatggagggtgggagaggactaaaagcagtggtggggctgggcacagtggttcatgcctataatctcagcactttgggaggctgaggtgggaggatcgcttgagcccaggagttcaagactagactggacaactgtagagacccctgtctctacaaaaaagtcaaaaaattatccaagtgtggtggtgcacacctgtagtcccagctactggagaggctgtggtgggagtatcacttgagcctgggaggttgaggctgcagtaagccatgattatgccagtgcattctagtctgggcgacagagtaagagtgtctcaaaaaagaaaaatagtagcggaagctgtgtccattctgttgtgagccctaagatgatcctacctgccacccaatagtcccctaacacctgagatatgcactttgtcctatcctagcctcacccctcctcgtggaaggagaagtttttggagcaaacaagttgtgccagtcttgggcccacatcccctccctgcctcacccatgctcccaatgcccaaagctctggaatctcttcccgcgtggcccaagcctgcttccactgcttggcaggatgtctcccaagcccctgggcccatgggctgactctgctcctggagtagcatccataggctgaaaagtgtgggagggaataaaggatgcacagcacttggacatgaaggatggggtatccacagagctattggagggagaagaggtgtaacaaaccagggtcaccccatgtccccatgttcagggacaaaacacagacgagtctgagaattttaaatttaaaccaggtttcccaagtcctcgtaaaggcacatttgtcgtggtaggagaatagaacatactttagttaacagtttgttctcttgatgtataatttttttaatattcagacataaagtataagtgaacttccatctgtcctcttgcctcagtccctgaaaatgccagtgtccacccagcatcctcatgggtggcacgaaaacccagacacaggcaatgatgctgtctctactgtcaactcagaccatccatccatgggcccactcgaccctccgtgctttactgttttccataatctaattcttttgctatcattatgactcaaagcagtctctcttggacatgagtttgtacccaccctcaaatagtctcaatggataagaggtaatcctgcttcctcccctgtaccttgggctccatgctaaccacacctgccctgtctggccccactgccagaggaaggagtcagacgtctgaacaagaggatggggtgaggtagaacattgagaggaaaaccctaagcttcagagaacctgcagagcctagcagaaattatttggtagttgcaaatagtgcaaaactgaataataggaaactggatttgtgaaatatcctatgtccttgtcactcctaacaaaagacatgaatgccattggtcagccaagacagacttttaaacatgcctgaacttctgaggcacaattgctgccaccaaaaccacctttctggtgatggcaacagatatctctgagagcattacatggatttttatgactctttcatagacacacaaaatactaagttattttggagaactgttactttctttatgcttttcccttgctaatttctggagtctggttgtgtgatggtattaaatattaatacctgttatcggcacatttactatgtttagaaggtgtcatggtatgttgttattttgatattagacactgtgcttccgctgactgtccacatggaatccgtgggcttacaaggaagacattcttcagaggaggctatctgttctccggcccacttcctaagagaaagcatggaaattttaaggctctaatcctacaacacatggatgcaaagacatgcacaaacacacagcgtggtcaatttgcttcactggtcgatatatttcactgggagtttagcacgtgtttccgtggacttttttcattgtgtgatcttcaatgctgatgtgttgacttggacaaacacccggagacttctctagaattccaatttgtgcaaaaatgaaagggctgagaaacatgattggctagtggacttgtagagaataaagtaggtttgtatgctatagagagaggaaagatcttcagatcatagaactctgtaagaaaaatccaaccacagagagaacacatggactccctaaactctttcatttctttggtatttcaaagtggtatcaaaaaatatgtatttttttccagaccggttgcagtggctcatgccatcccagcactttgggaggccaaggcggtcggatcacttgaggccaggagttcaagaccagcctggccaacatggtgaaactctgtctctaacaaaattacaaaaattagctgggcatggtggtgcacacctgtgatctcagctactcaggtaactgaggcagcaagacaattgatgaaccaggaaggtggagattgcagtgagccgagatcatgccactgtactccatcctgggcaacagagtgagactctgtcttaaaaaaaaaaaaaaaaaaaatttccagcatgttttgtgggtcaacagcatggtatgtgtgttgctggcgtttatctgtcctaggaattcttaaagataagcatggctcttcctatcatcttatgctttagaggaagtcattcttttttttttttttttttttttttttctgagacagcgtctcactctgttacccaagcaggagtgcagttgcatgattaatgcagccttgaccttccaggctcaagcgattcttccacatcatcctcctgagtggctgggaccacagatacatgccaccatgcccagctaattttctgtagagatgaggttttgctgtgctgctgggctcaagagatccttctgccttggcctcccaaaatgctgagattatagatgtgagctgctgcacctagccgagaaagtcattctttaaaaacccttctctttagcctagatgacttccttgtaaaatcctatgcacttactcattcggcaaacatttactgagcacatacgtaccaggcagcacgtaaggtattaaagacaccactgtgaacaagcagatgagatctctaatgtctggttccataaaggaagatcttttcttcttctctcttcaacctccatagaaatggaacccactaagtctaaaataacagaccgaacatatggcttcctttaactattcccgatggcagcattttacttggttaagatgagagccagaaatatttcgtgtcctactagtgacaaataatgtggtttcatggataaagcactggtttcagtctagagatctagtttcttacttttgctatcttttattacttaagtgtatgaagaatcaaataaaagccacctcttcagagaccttgtggtttagaattagtgaattaaatatagtggtgacctggaattggttctccctgctcactagagctgattgttaaaatttcatgaactttccaagtctgttgatgtcacactggtagcttgaaaccagccatgatgggagtatttacaccacaaaataggcaaatgctaaaacccggggcttttatttcccagaaagccagttgttaaacatttccctgcgcatcactaactaaagggaagggtaaacaccctgatggtgaaggggaaagtttggaaagacatcagcatatacatggtcaaaatgaaggaaaagaagcaaattagtacatgagattccaggcaagatgtatcctagaggctaatttattatatagggatgatgttcctctctttttccttcatagcactggttgtcatgacatttcgacccaaaacattgtattttatttatttattttttaaaagagacagagcccctcacagagtcacccagtctggagtgcagtgctgcaatcagagctcaccacagcctcaatctcctggactcaagagatcctccctctttagcctcctgagtagcagctggaattacaggcatgcaccaccacacctggctaatagactcaggacattttcatgtaaccctgtggactttgtttatgttctttactccactaatgacataggctgttagtaaacaaaacaaaaaacattgtaagaataaagagtattgtgtttagaatttcaatactccattgctgggccaaagaatattcctagagtttctgtggaattgcttctactttcattattgactgtctaagaattacaaaatcactggtattgtagccatttcagaatgaaatgggtgaagatgcactcaacagaatttgtgatagatccaaacataaattgatgaattttatcttgcttgtaattttggaaagtgaaaaaaacttggtctgagaaaaatgatactggtagaagaaaacctgatgacagctgtcactaactacacccagtcacacttgttatgatggaacaagtgacggaagcatcagtcttacaaaattcggacattccaaatgtaacccagggaatttggaacttcatagaaataatgaaaacagccaacacctcacagagcaggaatcttaaacagtaaagtttcacgaagacaaaaatctttttgatcaatcatgtctcttttacaaagtttacaaggaaagtattcatccctaaaactattttctataaaattaaaattaaatgaatagctatatgaaaaaactgtcataccacacacaaaatccaaagctgccagattacaacctctaatgaaaaataatcacctacatagactcttttaccatcatggacagagagccttggaaaagaaagctctaaactcaactgctaacaggttgatgagtagaccctgaggaagtcccagtgtgtgtggcttctttgtccatgggattctgtggattacgggctgaggtggcttatgacacctctgcactgtattgcatgaagttactgcacacatatgttgtgtgaccactgatcacatggagcttttcgagtgaggaggtttggaaatattgttgacccttgaacaaaacaggttttcaaactgcactagtccatgtatacacgggtttttttcaataaacatattggaaaattctgggggagatttgcaacaatttgaaaaaaacgcacaagttgtgtagcctagaaatactgaaaaaaattaagacaatgctaggtatcttatgaatgcataacatacgggttaattggctgcttatgttatcagtaaggcttctgatcaatagtaggctatttgtagctaagttttgggggagttaaaagttgtactcagatttttgacggctcagaacccttaccccatccattgttcaagggtcaactgtatgcagacttttcaatgaccttgcgggtagccaaggggaagccacccctctttccctgctcaatcatattccaagtgagttgagtccatcagccctgaggcctgggccaccggtgcaggagaagccatcagtcaagagaggaataagggatgcctgcaggggtggcgaagagggatgcctcaggaggctaattcttaaatggcccaagggggaaaatgagggcattggataggaggtgagagaagcttcctactccagaaagagaggactttttttttttttttttttttagacctggtctctctctgttacccaggctggagtgcagcggagcgataatggctcccagcacctttgacctcctgggctcaggcaatcctcctgcctcatcttcccaagtagctgggaccctaggcactcaccaccatgcctggctcatgtttttgttattatttgtagagacagggtctccctatgttgcctgggctgatcttgaactcctgacctcaagtgatcctcccacctcagcgtcccaaagtgctgggattacaggcatgagccaccatgtccagtcagaaaaggaggactttctaaccagcagaggagcccacctgttgccctcgggtggtcacatggccagtaactacatgggcaccagcagggcttctgtggtgtggacaaggtgagagtttctatgagtctgtgaaccagttttccaaggaaagaagggatggacttccaccagaattaaccccatttacaggccagtcctgtaagtggtagaaaggagttttaaccaccgcacctcacaccaccttgttaaaaaaaaaaaaaaaaggttactcttagaaaaattgaggcactggacattgttcctaattacatttttaaaatactttttaatttttttatgtgaaagatagggtttcactatattgtccaggctggtctcaaactcctggcctcaagcattccttctgccttggcctcctaaagtgcttgggattataggcatacgggcatgagccacagcacctggccaacaagagtttttaaataggattaggaccaggcgtggtggtttacgcctgtaatcccagcactttgggaagccaaggcgggaggattgcttgaggccaggagtttgagaccagcctgggcaacatagggagggagacctggtctctacaaaataaaaataaaaagatgagttgaatgtggtagcacacactggtagtctcagctattcgggaggctgaggtgggagaatcacttgagcccaggaggttgaggggcagtgagccgtgactgcagcaatgcactccagcctgggcaacagagcgagaccctgtctcaaaaacaataattaaaattaaaattaaaacactgttgttgagtaagggggctgggaatacagttctttccatatgacttctttctttctcgtaaattagcttgtcttttcaatggaaagttttcatgaccttcaaacttaaaatttttttttaaaatgactgttgggtgagggaaaacctgtgtcaaacagtgatccaagacactttaaaaatttctttcaattcacatagttcgaattgtcaagtctgatcctggaataacatttgtctgtccaacgtgtaaaatattgagtaatacaaagataattatggaaatattcagagaacttccctggacccagacacagagccacctccatttcctcctacctctcttagaaaaaaacaaaaagcattaaaaggagagatgacctgtctccctgggagctggttaagcgaccaggcaaaaaaagtgagatgcatttcttagattcggacttgacctgacaggtcctctagggtgagtcactttttcctatttcagtcaatttggctgtaaaataattacaataacgaggtcttgtttactgagactgaagtccgtgctgcccggcctcatttaacggctagaaagaaaaactgaaggttgtgattagaaagcttctgtagccaacctcatgcagcacggagatgagaatccaggacttgagtacactaagtgtctattaagtcagaactgtgagtagtggaatccaatataattgcttttgctgcttcttttgtgggtttgcacttgtgacctaaagtaaataaaatagcataaaataggaagctggggtgggggcaagaggagaagagattgggccgatgttggtcaaaggatacaaactttcagttcagaaggaggaaaaagtccaagagccgtattgtgcaacacggtgactgtagttaataccaatgtattgcgtatttgaaaattgcggccgggagcggtggctcatgcctgtaatcccagcactttgggaggccgaggcaggtggatcacttgaggtcaggagttcaagaccagcctggccaacatggtaaaaccccacatctaccaaaaaatacaaaaattagccaggcatgatggtgcacgcctgtaatcctggctacttgcaggctgaggcaggagaatcacttgaaccctggaggcggaagctaaagtgagctgagatggtgccactgcactgcagcctgggtgacaaagtaagaccctgtctcgaaaaagaaatacaagcaaacaaacaaaaaaaaaaacgaaaagaaaagaaaattttcgaagacaggagattgtaagtgcacaagtgcactcagaacaaaaaaaagcatatgaggtaatgcatatgttaattagcttcacttagccattctgcaatatgtatacctatatatatcaagatgtcatgttgtataccataaatatatacaatttttactggtcaattaataaaataaaatccttcccccaaaataggaaggttacgttggactaaagaaattaagagaagaggagaggagcggaggggatgggaagggtggggaagggacagtagaggtgggcggggaataggcgacgggggagggcagaggagggaacaggcctgtccttaatccttctcaagctctgtatcttgccaagatctggcctgtggcccggcgcagcaaaagctgggaaaatgccagtgactcaacccagttccattgatcagtgaaatggaaatcggggactctgtgtttcaaccccagtcagccagcccacagccagggtccaggtggcagcctcagctcctggcctcagtggctgtcagtagaatgggttggggagccagcctccagcggtctcacatagcaggcaggcagtgcagcctggagcccagccaggggacgcaggaatcctttctgctttttaaggacagactttgctttaccacagcagtcgctcttggggccacacggaaagccaccactgagtttactataaagtgacagaggctggtgtctctaggagaatgaggaatagtcacttcctgcctttgtccattagcgccgaccaacgcgaccagctccgtttacattctttcagtggtgttgttgaaagggcttggcagctcccaaatgtttgcagtgtccttagtcctatgagggctgccttcttcttcttcttcttctttttttttttttttttttgctagcttttagctagtatctggaaacatctactggacatgttggactcattttctcaagaatccactttacccttcagggaagccaggaaaagaacaagcttccaaccggtacaagtctggaggaatttcacagcctctcaaactacggtaccctttttgtttcttagtctagcctgttactgggatggttttaggatgaagctgctggggtgacatctgtggggaggcatggggaagcgcaggtgaagagaagttatcgttttaaatggtattaaattgctgtcaatattgagtcaaggtgtctaaggttatggtttggggaagaaaactatagctaactatagctactacagaaagatcttaaaccagaactcttttggggccctgaagaacttttttttttttctttcgagacagagtgttactctgtcgctcaggccaaagtgcagtggtgcgatcatggctcactgcagcctcaatctcctgggctcaagtgatcctccctcctgagtagctgggactacaggagcatgccaccatgcccatctattttttttttttttaattttttttagagacagggtctcgctatgttgcccagactagtctcaaactgctggattcaagtgattctcctgccttggcttcccaaaatgctggtcatgagccactgcacagaccaagaactttgtttttctggccaaggactttattttttaaaataataataagctatgtactgtctgcttgaactattggatggccaccagcatttaatcccatgggatgtacctgctgctgcacctggcagtgtgttcctgtcacctgctctcatttccctcttggagcagcttatgaaggagagatgccacctgcatcttttgaaatgtgatggatctgcctgccctgagcagaattcaaactggatggtgaattgaggactgctggaggttaaagggtacacatgaagttttcaggcagctaattaaaataaactagtacatttctggaacctaaactgctccaatgctgtaggcaaaattccctgtctgccctggctcatcagaaagagtttgtatatggaaaacttcagaacagaacaaaggaacttaagtctggatgaggaatgaagtcttggctctcgtttagcaattcctgaactgccaggtgacatcaaatcccctgccgaagaaatgtctgaaataaaaagaattccagacattaggcctggtttaaaacagggtatgcttttttatttgtgtgcttctgggtctaaacaggtcatggtttgctccccaaggtgacagtgtggctcccattccgtccctagttctgagcatggcactgtgatttctttctggagttgctccaacctgtggccttttgctaatgagtgatgaaccccagaacctgaacttctagagtcagcaaaattgcacactgccttctcaggaggtttctggaacattggccttcatcccagcaggatcacaagtggaaagaaacacagggaagaccccgtcaaatctttaaagtggccacagcacggagcactgacacaaagagacgatggttctggaaggaggggtgggatgctctgtgtcactattgttttctagatgggattccgtgcacagatcatcacaactcactgtgagtgcaagcaggggtgtaaatcgtggggccgaaaaaaacctttgtgcaaagatccttgctcactcactgatatgcacttctcagctatagattcatgcttttccacttgttgaaacgtccctaaatatcgccctcaatgtcctgtttgtgtcgctggctctctgccactcagctaataatgaaacagcctcagtgaacctgcagcagcagctgccttagcttcagtgcctacccacccctgcagctgaaccactttgaatattccttgatggtgcaagagacagtctcactattcccttcactggccttcctctgtgtccgtcacggttggcatgagctacctcctgtgcatgttatggcgagaagggatgaatgaggaaagacagggtggttttatacttgatcctgggacagtcactgggtaaggaagggtttggggttgctcccccaggcccccctcaatgcgtgaaggcctgagccaggtcagctggcagaggtgtgtgtatgtttaacttagaactgaatgttgaaggctttgtgacccaaagggaagaattattgggatctgatgccctagcaggggaaattccaagcccaaaaagctacagttagaattcagaactgtgttgttaccctgcctctgagttttcctctacgttcagctccccttttgtggatgatcgtgaagctgtttacatgttgtcctcttccgtgaactgatccctgtaaacagtgacaggattttatccaaatatttctgatttctaagggaaaaatagagcaatttcttcccagtgcccttctgttgaccttgcctgggggagaggccagcagagctaaggatgacctcacccccttccagcaggatttcctgggatgtacagaacctccttcttcagctgtccctctgtgatcagccacattcaatctataaacttccagtgcagatgatggggacatctaatattgggtctgttcacatttcagcaggaggtgaaacacacaaagtaatcattaggcttcctgaagtcccaaggaccttctacgtcagtggcagaggtgggaggtgggctggcgaggtggggcagtctaggaactgcgctggtggggacaggaaattgggctgaagggagatgtaaggccttggtgggaaataaatggcactgtgttgttgacggaaaaagatcttggcaggactgttgttgtgagtgttctgtggcttagaaaggaatttcctacaggctggactaaccattaaaaatgtctctaccttcaggagtccccggcgtgcagtggagcctcgctgggggaaatgacagcttggaccatgggcgcccgcggtctggacaagcgaggaagtttctttaaggtaaaaggaagccttgattgggatctcaactcgtcggcttgctgcctgagcctgggagctgcggtgctccatggagctgctgagggaagtctgctctctgagccagcaccggctaagggagcttgcccgagcccagctgctgattgttaccagggcttataacaggttgcggggtctgtgatttagtgctttcatacaggcacaggactcgggcacggagaggggccgtgctgtgcaagacggctgaggctgtctttatttgagagctgctcagtttgtcctttttcagctgcagggttttatggtggaagctgtactttgctttccagtgaatcaatgctgtcgtccatgtgttctctccttggcttgtttgtatgaatcactgaagggctccaaaacaaacaaacaaacaaacaaacaaacaaaaaacagcttcctggaccgcaccttagaatgatgaaatattattttctggtatattttatcaaacatccccaaaggcttcttatgataatgaggaagcatgattataactgtctaactcttctgtgttcatattgatgttaatgggactaaattaccttgctagcttaatgagataagattttaaatgggtgttttatgtactctgtgtgtgtgtatttaatgaagacttggtggtcgcttctgatttacacttgggaatcaattcccctcttgtggctttttgctttgtttcctttcattcaccctcgaattaaggcatcctcagtatagaaaattttgaaaatacagaattatgtttaaaaaggtagaaaaatggaggtaaaatatgcacttgaaatctgtcataggcagtgttccaacaccaggtcttgtcctcagaggaggaagacggaggagattttattaccgaggacaagtgactatgtttaacaattaaccaacctttatgggttggaagtatctattaacacttatttacatgtttcctgtttccaagagaccaaaactgatatattgtgtcaactgttgactctacaaaaaaaaaaaaaaaaaaaaaaaaccatcagaagaacctgctgataaagcaaagttcatgagatttactgaaataaggaagaacatcaccaggacacagtcttattcatgtctaagccaggggagattaagaggcagatttataggattcggggatctaggcctaagtccttcaagctgcatttttcaaggtggagaactaatttgatttcagtgacgtctatgccacaatagcttgggactggtggatacagcaagactagtatattgaagtggctcttgacaagtaaacccttgtttgataagtgagctgttttcccaggtgagcaaattgcttgccaggacaaattagtgtgtagacatttcctgcaacaaacagtgaagttatttattggtttacagtcttaattttctgggcaagaagatcctggaagaatgagttacgttatgttgacacagatggtctcaattatcaatcctaatagttaagctttgtggacaaagtagtctcagttctcaaatgatttactcagttttgatcaaacctgtataacctccacccattggaggcaaatgagagtaaggagctcctcaagtcctctgtagatcaagagctaagcccaccaggttgcccaattgtcatcctccaggttcctgagttgcatctgatgctgagatatttatttccccctgttaagagggatgatccaaaacctctccttaacccaaagcactgtctagatcagcctaaatattggctagtccataattaccaccttatgatggtcaggaagcacagtggagccgtatcttacatagtagttagattttaaagtcaaggcaaaagaagaaaatggaggccagccatggtgcttcatgcctgtaattccagcactttgggaggcctaggtgggcggatcacttgaggtcaggagttcgagacgagcctggccaacatggcgaaaccccatctctactaaaaatacaaaacttagctgggtgtggtggcctgcacctgtaatcccagctacttaggaggctgaagcaggagaatcgtttgaacctgggaggtggaggttgcaggaggttgcagtgagccaacatcgcaccactgcactccagcctgggcaacagagcaagactccatctaaaaaaagaagaagaagaagaaaatggagtataaagttgcctttgaacatttcttaggaaggtgccctgaggggcccaatgtactacctatcatcaagtccattgtagccagtttttcctgcagttctaagaaaatcatatttgtttttatttgagttttcagtgggacagcagttaagtcattgacttgtatttctgggctatgctataggaaagaaccaatcaggtgagaggtgagaggtctgcctgaccccgccaagggtgagatctgccatgtaacctctcctgggtcaaatacccatgaaaatattggcaaaggcacctgcactatttaacttgtctgtaattttgtgtttttggcagagtttaaattgtttaattcattaattaattaattaatttattttgagacggagcctcattctttcacccaggctggtgtgcagtggtgcgatctcggctcactgcaacctctgcctcccgggttcaagcgattctctgcctcagcctcccgagcagctgggattacaggtgcctgccaccacacccagctaatttttgtatttttagtagagacggggtttcaccatcttggccgtgctggtctcgaactcctgacctcgtgatccacccgcctcagcccccaaaatgctgggattacaggcatgagccaccacgcccagccttgtttaatttatttaagtcagatgctccatgtaaatgatatagttactttatacttctttctttcctctttctttctttcttggagctcccaggctcaagcaatcctcccaccctggcctcccaaactgctgggattacaggcgtgagccaccgcacccagcctccttcctcttccttctagacatggttattctttgctgtaacaattattccgtaattagtcaccaatattcacatgtagttctctgtgaggagaagtgaactgccctttggacattcagtactgattctttgcaggttcatttgtaacaagctggaggggagttcggtgctgagatggattgtcacccagtggccaccttctgggacccactggccctgctctgactcaccatgctttatttcagttctcacctattaagcgcccatgagcagccaagctctgtacgtggccagggagagaaaaagcagaagccacccctaacctcatggagctttcagtctggtagcaaataaagatattaatcaaataatcacagcaccagacacataattataaatcatgttttaaaaatgcttcatgggagatgtaaaaggagccctgagaatatataacctaatctggggttccagagaaatctttcccaaggaagcggacttcgatttgagagctgaggtcgacattataccatttaggaagatggttggagctaagttttggagtgactcttgatgctaccgcaacgcacttctcagcagataccagtgatgccatacaattggagaggatgctttcataaagcgtgaggtttcctggtcacattcttggctcacagctgaattccacatgagtattatccctctcttggctattagtgctcacgtgactttgtgtaaagcacagataattggaaggcaatcattggacctctttttcatcattatcctccccatccagtttgtgtttctaagccagagttgctaaccactagtagttagcactactagtgatttgtggtttcccatctgtcctggctcatggacatgactcagataggctggaggacatgaggtgcgtggataacacacagattatctgagcattctgggatcactgagatgccctgtggttactgtggaatcgcatcccagaagctccgaccacatccatccatgcagataaacccattttccaggcactcacagcaccattgttaattttccacaaccatctgggaaaagtggtatcttcctgctccacaaaacatatggcagagccgggcgccatggctcacacctgtaaattgtagcattttgggagggcaaggtgggcagatcacttgaggtcaggagtttgaaaccagcctggccaacatggtgaaacctgtctccactgaaaatacaaaaattagccaggtgtgatgatgggcgcctgtattcccagctactcaggaggctgaggcaggagaatggcttgaacccaggagatggaggttgcactgagccaagatggtgccaccacactccagcctgggcaacagagcaagactgtgtctcaaaaaacaacaaaaacaacaacaaaacacgtggtggggagaaggggtaacaccctacacatggtagccaaagttacctgcttttaagtaataaatgtgaacacctactgctatcacatttcaaaggtacattgaacgaaagagtttgtataagaaagatgtcatctaggctgggaaagctattggtagtcttgaattaggggcagagatgctcaaagttatctttgatccccgctttccctgaatcccatagttacccccaagccacccccactctccctaccatccaggctcccaatgctggcaaatcctcctctttaaaaaaatttttttaaatttttaaataacttctctttttaaaaaaatagagatggattctctgtgttgtccaggctggcctcaaactcctagcttgaagcaatcctcctgctttggcttcccaaatccctgggatttcaggcatgagccagcacccctggcctaaatcctcttcatgtctccaaagtccttgcctttctttcctgtcctataaccacctttcctgtcctatatcctgtccttgcccttctttcctatcctatatccacttggctattagtgctcatgtgactttgtgtaaagcagagataattggaaggcaatcattggacctctttttcgtcattatcctccccatccagtttaggttctcattctttcatttggttctccttcttccattgtgggcattataaatgatgcctataatccacccacaccaacactgtacatgtttctactgatccatgtcacctgcttgaagaccctggctccttgctgggcacaggaccaagtctgtaccttgacattcaaagattttcaggctgtgcttccactttcccggaactcttcctccaccggtcctgcctctgcagcatcgtgagtctctcctggggtccaaacccaccaatccctgcctccagccttgcccaccaccctatcccttacccctccccaccatcagcctcccaaccacccttccaggctttagacccacttcatccactgacaacagagctcacatgggctgggctggtatcttcctttagttttgtctgaagatcaaactgtgggagaaatgttatgtatgaaggcctagctgtagtctcaatgcagtgccaggaaataaacttcaattcataactctgccataagggatttgttctttccatttgtcatcacggctatgatcctgagagggatcctcttatagcaaagaatggtgccagaagagaaccagggtgaattgtccggtcgacagttctaatttcttaccggcatacctttgggcttcctgagcaagcctgccctccccagcctcaagtgtgtagagtaccccctttctaagtggctgccttctaaccttccttggcctctgggacagggtgagagttgagagttgctcttactagaccaagaagaaaacatgttttagcttacagggatcctaccctcccgggcctcaaaaccactcatgctgcagaaggatccctgaacctaggttcacgaaccaaccggggtcattcaaaggcccagcccagcagcagaggcccaacttgagaggccctctttggtcatgtctcacaggttggataagaaggtgcatcacgattgtgtttcagaaacagaaaacctgtcattatatttcagagaataacagaagagctctctgacaccacaaagactagacctgcgactagctttgaagaaactacattgctgaaatctggctataccgaatagatgaaccagtgggtgatgattcacttgacctcagctgagttccctcaactattggtctcttcttggcatttgaaaaagtattcaattttcaaaaattctgtctgccaagcaaaatttttcaatcattcagaactggtccaactgcacatctcaggcctcagggattcccagtaatggagttttcagatttttttgtttccagataagtggaaattcattcatctgcatgcacagtaacaatgtactgtggacagagattgcaggggcatgaaaaataatggatagaatcaaaaaccacattttagtcagtaatttctttttttattttttttatttttatttttatgtttttttgagacaaagtcttgctctgttgcctaggctggagtgcagtgacatgatcttggctcgcggcagcctccggctcccaggttcaatcaattttcctgcctcagcctcccaagtagctgggattacaggcatgcgccaccacacccagctaattttttgtatttttagtagaggcggggtttctccacgttggccaggctggcctccaactcctgctagtcagtaatttcattgagcaaatccttacatggttctctggatgctcaaaagccatagagatgaatgttgcccccttggcctcccagcagatcccctggactgtgagtagacggaacatcacctgcccactgtccagtgagtccacatccccacaatgtatcagcccacaggcctctcagcaccttgcagtggaaacagcagagcaagtagagatttagtcacagtgacaatttactcataatagtattgcaaagcatgcctcacacctgtatctggatgtgtcttttgttttccataaataaattcttcatagacactgacacctggagaggcctcagagcatagaaacaatagcaccatagaaaacaatgtaagccacagatgtaattttaagcattctagtagccacatttaaaactttaaaaggaaaacaagtggaattaatgttaataatatattgtatttggcctaatatatcaaaatatcatcatgtcaacacatgatagatataaaaaagtattaatcagatattttacattcttttttgtaccactttttttattgacaaaaatggtatatatttattgtgtacatgttatttgaaaacatgtattattccatgtctttgaaaccctgtgtgtattttacactcagcatgtctcaattcagaccagctacattttgttgttgttgttgtttttgagacagagtctctctctgtcgcccagactggagtgtagtggaacaatctctgctcactgcaacctccgccttctgagttcaagtgattctcctgcctcagcctcctgagtagctgggattacagatgaaccgccaccatgcccagctaacttttttggatttttagtagagacagagtttcaccatgttggccaggctgctctttaattcctgacctcaagtgatcttcctgcctcagcctcctaaagttctgggattacaggtgagtgtcaccgcacccagccagaccagctacatttttaagtgctcagtatccacacgtggctggcagctgccagactggacagcaaaggtttagctggtctaaatcccttccttctacagatggggaaactgaggcccagtttaggctacagcagggatgggagtcagacctgatctgacattgctctgtggcttcctgaccccacgtaacctcctgctctggttcttctgtgactgtcttcccccttttccagctccctctcccagaaaactccatctgaagaggtcataagaatggtggtctctctctgcaggaactgttggcttctttttttttttttgagttggaatctgactctgttgcccaggctggagggctgtggtgtgaacatagcttactgcagcctggaactcctgggctcaagctatcttcccccatcagcctcccaagtagctaggactacagatgcatgccaccatgcctggcaacttttattttagtttttgtagagacagggtctcacttcgttgccccgtctggtcttgaactcttgggctcaagtgaccctcctgcttcagcctcccaaagtgctgggattattggcatgagctttggtgcccagcctgttggctatttttggatgcacacacatgcctctcaccatttgttccaaacatttccaggactcaagtcagcgcccccaaggcatgactttctaggaatgctatgagcctatcgaacagaaattccttttcatattttcaaaaagcaatggatctcatggttttataaatggtttttccagtacattgtggccattcatttctgatgctaacagcatgtgtcgttccaacacatgctcatcttcgccaggggacttctttgtttaaaaatcaggagtgaagcagattgcccaggttcccctcaatgatgtatttctccaggcttccttgtagctctaagtttcatattagaaggataccaagaaggaagatgtagttttgaaggactattgtgtcaatgtaaaattttcaaaaagttaaaatatgactcttgtacaatatagaatgaacacctgccaaagctttatctcacccatttatgaggaaaccagtaaatagtaaaactggttcaaaaaatgctttgacaaatgatgtatttgtagtcaacttagaaaggcagtctgtgataagtttgctgagttaaaatccaaactggtaacatcctacaaggcaataaaactgtaacctttggtgttctccctttttacagaacagaaatctgcaggctggtatataacctcactgtgtctgatctcttcattaataccacataagtcaaacacagatacattcctctagacaattaactaatccatagataaacttgttaaatcacgtgccagcatggcaatgaaaggacaaactcaaataaacaaaaaggccctttcatctagaagttttaaaaccctctaataaacaactctggggtgaaagcagaaatacaaactggaattacagaaaaaaatgatacaaaatgataatcaaaacactacctatcagaatcaatgttatacatttaaagcagcaatcagaggaaaattcatagcactaaacactttttatcagaaaaaacacgccccacctttttaatctatttccaagtctgagtgtttcttaataattactgctgaaatggcttattcccagccacttctattatgcctctcctttccttgttcccaaatatccccaaccaaggatttttgccttaaaaaatcaaatgtcttcaatgaggttgaagaactatgtgacagctagctctatgtttattgacttaaatactggtagaggattcctgggctctttttcatggtgtaaaatcctcacagtgacgctcttggtgttgctctaatccctaaactcagatatgtacatatatatgtccagtggtccgaggtgaattggatggagaataatttcccagcataaaatctttcaaatgtctttatggtggcatgtagaaaaccatttccacaacataatctgaagctgtactatctattgctgtgtaactaattacccaaaatcttagtgacttcaaaccgcaaacattcatacctcacattttctgtgggtcagagatctaaacgcagtttagctgagagcctcaagctcaaggtcactatgagatttgggaggagttggtggccagggtcatagtctcatctgaaggcttgactggtgaggaatccacttacaaactaacttggcaggtctcggtccattgtcaaatggttctcttcacaggggtggccttaggacatggcagatggcttcctcacatggcaaattaaacaggagagagcaagagagatggaagtcacagtctttttataacctactcttgaatggtaccccatcacttctgctatattctattcgttagaagccagtcaataagtctagcctcaggagcaattactcaaaggtgtgaatatcaggctgtggcttacactgggaacatcttagggagcgcaacatagaaaaacagctcagtcacaaactcaacaacctgcagggccaaacagaaataaaatgagtgagtgggcctggcatcagacaggtgggattggtggagactgtaacaaaactggagcatacaagtcccttctagaaggagaaactgctctctcagttccaaccaattcttgtcatgcaagaatgaatgtgggttttttggttttttccaagtgagggaggccagaaatctagattttcatgtaaaataatcccaatttaaaaactattctggctgggcatcatggctcatgcctgtaatcccagcactttgggaggctgaggctggcagatcacttgaggtcaggagttcaagaccagcctggccaacatggtgaaaccctgactctacaaaaaatacaaaaattagtcaggcgtggtggtgcatgcctatagtcccagttactcaggaggcgaggcaggagaattgcttgaacccaggaggcagaggttgcagtgagctgagattgtgccactgcactccagcctgggcaacagagtctcaaaataaaaaataaaaaaataaaaaccgtcctaaagtcaggtacagtggcccatacctgtaatcccagcactttgggaggtcgaggtgggaggatcacttgagcccaggaattagagaccaccctgggcaacacagggagaccctgtctctactacattaaaaaaaaagaaaaaacaaaaacaacaacaaaaattaggctgggtgtggtggctcacgcctgtaatcccagcactttgggagtccaaggtgggcagatgtcctgaggtcgggagtcccagaccagcctgatcaacatggataaacctcgtctctactaaaaatgcaaaatgagccaggcgtggtggcgcatgcctgtaatcccagctacttgggaggctgaggcaggagaatcgcttgaacccgggaggcggaggttgcagtgagccgagatcacaccattgcactctggcctgggcaacaagagctctgtctcaaaaaaaaaaaaaaaaaaaaaaaaaaaagaaatgtacttcttggattccactccagacccagagaatcagaaactgcaggataaggcccagctctctcctggtgattctgatgttcacccaggtgggagaaccactgctccagaccctgtatttcaatgagtgaacggcactatacaaaaagcatagaaacgtcttcattctcaacctagcttcatgtccttctctggaaaatggaatgataccaccttaccagctggattgtaactgtctgttggtcagatacagtattttgatgatttcagtcaataactctgcaagccttggtgttactactggtgtctttttctgtctgctttcccccacccccgtccccacattttatttgctttctcaaaagcatctgcacacagatacatgggtggacatcctcagaggcagggtgactcagccgaacagaaccctgcaacatgcactggcaaaagtgccccacccagcgtcgaacacccgaccttgtcatttacccacgggtgctagcacaatcagtgtgctacgattgaggggcggctcttccccctgccaactaaaccctggggaaaatgaacactcaaactccgttgttggtatacactgccattagccaaaggaacaaatgatcaaatggaaaaaacagacattttgttgtttgacatttaggtaaaatcaactattttggtgccactccctaggcacagcccagccttcttccttattcaattactttgtaatatttatgtttaatctaataaacaggtcgagtgcggtggcccacacctgtaatcccagctctttgggaggccaaggccagcagatcacttgaggttaggtgtttgagaccagcctggccaacatggtgaaaccccgtctctactacagacacaaaaattagccgggtgtggtgcaggcgcctgtaatctcagctactcaggaagctgaggcaggagaatcactcgaacccgggaggcggaggttgtgatgagccaagatggcaccactgcacttcagcctgggcgacagaacgagactctgtctcaaaaaaaaaaaaaaaaaaaaaaaaaaattgagcaaacacactgttccaggcattgttctaagcactttaaaaccattaacttatttaatcctcacaatattattatcccccttttgcagttaagaaaactgaggcatgaagaacttgccacacagtttgtgaagtatgtggtggctccgtggacactgtatataaacttgggaggaatttcatagagacaggacccagcactcattggactcctccgactctccttgagtccttgagatgctgactctgtgcctcagccagctcagaaatgagactcaggcagtctctcctcccaccaccttccatggagtgctccctgggctggatgctagtgagctgagcctctctgaactttcccactgcacctgtccctcaccgctgtcctttgctggccacccaccactacctctttccgatggccatctctgagtttcctatagcaaaaggtggggatgattcttctcaaaggccaccaggaggacatccttcctcaaagttaggtttatgagcttgtgcagacagagagaatgcccactgacagaggcataggaggttctcagtccgagggagctgggggagctcattacagggtttctgcttgcgctgggtaattctaaggaaggtggggttgcagatctagcaaataaaatatacaggacaccagtgaaacttgaattccagatatggcataagtatatcctatgcaatatttagcacatacttatactaaaaaacattattcattatttatcaaaaatttaaatttggccgggcacggtggctcacgcctgtaatcccagcactttgggaggcctaggtgggtggatcacaatgtcaggagattgagaccatcctggctaacgcggtgaaaccccgtctctactaacaacacaacaaattagccgggcatggtggcgggcccctgtagtcccagctactcgggaggctgaggcaggagaatggcatgaactcaggaggcggagcgtgccgtgagccgagattgtgccactgtactccagcctgggcaacagagcgagactctgtctcaaaaaaataaaataaataaaaataaaataaaatttaaatttaacttagcatcctgtattttcttgagtaactctacaggagggctaagatgttgtcaggaagtgagggtaatttgttgctaggggtagcttgatggtctttatctggaaggggaggaaataaagggagcttgagggatcatcggtggaggagcagccagcgctcgtgtgtgtcgaaagagggggccatttcgtcgtttttgtggtttcagcatcctggtttctgttctgtcatttcagacctgttccctagtggccttgaatagttggtgtttacattgtgtctgtgttgtttatgttctgttgggagcgtgccaggggtgtttcttcctttctcattctacttccagattctaggcttgtttcagggtctcaaagacacaggtcacttggggttctgttccgggacagctggttccaccttgaccactggttctctggaaatatttttggttgccaccactgggatggggatgctactggtctctagtaggcagacgccagagatgctgccaaacttcctccaatgaccaggacagcccccacgacaaagaattatctagccccaaattctaacaatgctgatgttgagaaatcctggtctgcactgtaaattaggaaataaaatttgtgtttcttgaggtttctccaactatctctgaatcaggctttccagaagtaaaggaaatgaaagcaagaagactgtgatcatgtatttagcacccagtgtcctgcatgctccttgaggacagagagagtgtcttactgaatttgtattacctgggctgagctcagtacctggccggtaattgcaggtgttcaataaatatgctggatgggccgggcgccatggctcatgcctgtaatcccagcactttgggaggccgaggcgggtagatcacttgaggtcaggagttcaagaccagcctggtctctactaaaaacacaaaaattagccaggtgtggtggcgcacgtctgtaatcccagccactcgggaggctgaggcaggagaattgcttgaacccagcaggtagaggttgcagtgagctgagatcatgccattgcactccagcctgggtgacagaatgagacttcgtctcaaaaaaaaaatatatatatatatatatataaaatatatatatatatttgctggatgaataaaaaaatgtgtagcacacatctgtatgcgctgcctatatatggttcatttattcagccagtattgattccacacctacaatggtgaggccagccctgggcaccgggtatgcggtgctgggggaagcaaatcagaattggagaaacttgaacttgaaggatggggatgaggggcagggctactcacattggggtagggaaagtcttcctgaaaaggtgactttaagctgaactgtgcaggagagaaagagacgaaaggaagagcattcccggataaggaagccacatgtttaaaggcctggagtgacatctgaggctctgagggagaaaaagggtggcaagtataatgaatggcaggccggaagggcaggaggggcaggatgccagtcatgccagccaggtgaacactgggattccattcttagtgctatcggaagcggtgatgggtatgaggaggggagtgccacctatgtgccaccctcataaagctcacccggcattagcactgtgtctccatccatcaaccaagaaaaccaaagtgcaattaaaatcttccctggagtcactcaaaggaggccagagccagcctccccatcagcacaacttgaaatcttgacattgagttgctgttctttctctacacttgcttcttcaggtgccaagcagctctctcaaattgaggtagccctgcccttcctccccatccttcaagttcaagcttctccagttctgatttgcttcctctatctctcccaagctcttccagcctggtggtcctctctggtttactctgtcccgttcccactttctggtctttattgtacaggtccccttgacctggctggggtctttagtatcatggttttcttctctgccccgattcagaatctgctcagcaaaagctgagccagaacagactcaaaactcacaccttccccacttggaaggtaagacagggaggaggattgcagactcctgtcatgtgcatttttcaggattgtctcatactctttgaaataactcgtctacctgacatatgtggagtggacaagagaggggcaggagagggagtgagagaacctctgaggacaaagcaaacgatgacactcaggccacatccagctggcatctgtgcttgaaagtcaagttctggctgggcgaagtggctcatacctgtaatcctaactctgtgggaggctgagatgggaggatggcttgaggccaggagttcgagaccagcctggtcaacacagtgagaccccatctctatttataaagataaataaactaagaaagtcaagttctattggagctgggcatggtagcgtgtgcctgtagtcccaggtgctcctggaggctgaggcaagaggatcacttgagcccaggagttcaaggctgcagccactgcactccagcctggacaacagagcaaaactccatctctaacaaaaaacaaataaacaaacaacaagttctattggaacccagccattcactcacgtattgtctgtaactgcttctgtaccattaactgcagagtttggttgctacagggactgtattgcccctatataataattcctaaaatattcattctctggccctctgtagagaaagtttgctgaccactgacttaggaactaactgcatcctgtcactgaattctcaaaggtagtcttgagtgtaggtagcagtatctctatttcacaaacaaacaaacaaacacatgccagggccatgaatctatataaacacccccagagagtaagtggcagagccaagattcacagcctgatctcccagggcaggttccattctctatcctgaactgcactacttgcctcatacatacaggttgtcagaaacagctggaatagtggctaggcatggtgaattacacttgtaatcccagcactttgggaggctgaagtgggaggattgcacgagtttgggagtttgagaccagcctgggcaatacagcaagaccttgtctatactaaaaataaaaaattagccaggcatggtggcatgcacctgtagccctagctaccccggaggctgagatgggaggattgcttgagcccaggaggttgaggctgtagtgagctataatcatgccactgcactccagagcctgggtgacagagtgagactctgtctcaaaaagaaaaaaatagcaggaatgaattcatcagaggtgttaaccttggatgcttacaggggccaggaagataatgtaggcgagtgaagccaacccaggccaaagttgataaatggcaactgacatttggcctcagtattagagaacaagaaccatagggagtggtggggtctgcggccatctggagaatagatatcccatctaacaaggcagcatcaccatcgtggtccagggtttctaattttcaagaagctggaaacctgaatttttttgtttaagtctcctgacttttgcatgaaatattattatatttaaatgttgaaactagtttaactctaaaagacaagacaagcccatgtgaagcaaactgggcagagcatggatgagtgtcctataggccactggagtatgacctctgatatgtgacatacacattggagtgactgccacagccttcctcaatgtcttagactgttttctgccgctaaaacagaatacctgagcctggctaatttataaagaacagagatttatatgctacaactctggaggctgggaagtcccaaggttgaggggactgcattttgcgggggccttcttgctgcgtcattccatggtggaaggtggaagggcagcagagagtacatgtgcatgcaagggtaggagggagagagagaggaagggcaggagagagaaggaaaaggggctgaactcatccttttatcaggaacccactcctgtgataaccagcccactcccaaaataatggcgttaatccattcaagatggcagacccctttgacctatttacctcctaaaagccccacctctcaacactgttgcattgaagattaagtttccaacatatgaactttgaggacacagcccaatcatagccctggagagggttgggtcttgtggaggggagaggcagctctaggggaggcagctgggggttgccctggcctgtgtaccagacagagccctggctcccagccaaaccctcagctggacactgggtgcattctcatccttcacttatcaccagagcgaggaaggaaggaagttccacccatcaccagaagctctccacttattacttcaaggaaggaaattccaaggaaccaaagaagatacagagatgcaggaacactgagctcaggaaggaagagggtggaggtgggtctgggaaagccccagggtctgagataaagctggtgagtttgtcctgggtatagccacagggccttgcccagagtccacacactcaccttttcaaacgtagtaaaagccaatattccctttaatgcatcaaagatatgtgtacctcacctgggtaaatactggtggaaaggccatgggtttgtaagggctgccaatccctgttgcaccattaccagctgcatgacattaagcaaactctcagagcctcagtttcctcatctgtaaggtgggattaataaatccctgtcctatggtgctaagacgatggaggattaagtgagacaatggacaatgccagccatcaagaaggcccctccttaaggggcagctgctgttggctgaagctggttaatgaagtgttatttcttcaccttcctcatgcctgtaacattgacctctgagccttcaccacagtcgggagagcttaggtccatgctccatctgtctgcagggcgatcacttccaaaccaaaaaagactcatccaagaggcattatgttgtgttatggacataggaacttcagagtttggacatcggccaggcgcggtggctcacacctacaatcccagcactttgggaggccgaggtgggcagatcatgaggtcaggagatcgagaccatcctggctaacatggtgaaaccccgtctctactaaaaatacaaaaaattagccggacgtggtggcgggcgcctgcagtcccagctactcgggaggctgaggcaggagaatggcgtgaacccgggaggcggagcgtgcattgagctgagatcgcaccactgcactccggcctgggccacagagcgagactccgtctcaaaaaaaaaaaaaaagaaagaaagaaagagtttggacatcaagggggtggggagataatcctctggtaagtaaaataattctgtggaaacaatctctcattcccagcatgcaggttaatgaagattgagaaaaattcaagtaaccccaaaacatcatcatttatttactaagacttcgagtttcaaagttcaaagcttttcagaatcaaattgaagagtcagaaattactcacaggcagcagaagttggcggccctccttccattctgttcagagatttgtggtcacttgtggaatatccactatttggaaagagctgggcttaggggtgggcaatggaaaaaatacacgtggaacaccacgcctgttgttcagtttgtttgtttatctttgagatggagttttgctcctgttgcccaggctggagtgcaatggcctgatctcagctcactgcaacctctgcctcccaggttcaagtgattctcctgcctcagcctcccaagtagctgagattacagacgcccaccgccactcccagctaactttgtatttttagtagagactgggttttgccatgttggccaggctggtctcaaactcctgacgtcaggtgatccacccacctgggcctcccaaagtgctgtgattacaggtgtgagccaccgcgcccagtctgctcttcagtttttgttagtaacccactgaggcccataaaacaaacacacctgtcatcagagcagccagctttataatctcctcctccaatccccctcgttgtctcctccgtcccatcattcaccccacacatccttccctgccctacccccaaggcaagattaaatgccttcagaggttcccaaatactgaggagttttgatccgccaccacttatacataactaaaaataatttcaatttttcccaagtgacacagaagttacctatatactgaaattgaaatcattcctttctggaactttcaacagccaagtgctgggcaagttcatccgagatgagcatttgtgtgcttgtgtgcacgtctctgtgttgagccccggcacacactctgcaccctactccccgctggcatgggatgatttgggttggagcagttgtgcccactattgtgggcatcatcatgctggtcccctttcaccatcccaccaagttatctcatcttttacagatgaggaaactgagatcctggtaggttacagtctcgccgcacaggtcccataggtagtaggagccagcagagctagtttcaggccaggtctgtgtggtttccagggctcatcagtaagctaaactggtctccttggtggccacaagacattggcttccccagaggcactcagcaggcagcctgggtgtggtgcggctactagtaaatggggaccatgatgcggccatgcctgggagcccagccagtcttgagcaggaaaaggtggggcccctgtggtagctgcacacgcttcctccagcttgcatcccaagtgtccatcaacgcagattttgaggacaaggcacagagctggctgaacttttcaaagaagagatttcccaacaggaagaatgtgcaaagtgagctctgaagatgtgctaggagaaattaaggaagtgtttccttgcaacctggtttttaatcttgtgtacattaattttttatttattttaatttttttcatactttctctcttttttttgagacaaggtctcactctgtcacccagactggagtgcagaggcacgatcttggctcactgcaacctctgcctcccgggttcaagtgatttccccttgaatcctgagtagctgggactacaggcatgcgccaccatgcccagctaatttttgtatttttagtggagtcagggtttcaccatgttggccaggctggtctcgaactcctcacctcaagtcgtctgttcaccttggcctcccaaagtgctgggattacaggcataagccaccatgcttggccttcatactctcttttttctttttcttttcttcttcttttttttaatcattcttgtgtatattgtttgaatttttttttctctgtgagaggaagtgaacttttttttttttttttgagatggagtctcactctgtcacccagaatggagtgcagtggcgcagtctcggctcactgcagcctctgtctcctgggttcaagtaattctcctgccatagcctcccacagagctgggattacaggcgcccactaccacgcccggctaattttgtatttttaatagagacagagtttctccatgttggccaggctggtcacaaactcttgacctcaagtgatccgcctgcctcggcctcccaaagtgctgggattacaggcgtgagccacaccgcacccagccaggaagtgagtttattgatataattccaaacttccagaatagttgcaagaagagttcaaagaacgcttatatatccattaccttggttccatatgcaccagtggttaacatttcactgcccttgctctgtcattctctttctacacacacatacacacacatatgcagaattatataaatatgtaaatttttttttttgagacaaagtttcactcttgttgcccagcctggagtgcagtggtgcaaactcgactcactgcaacctctgcgtcccagtttcaagcaattctcctgcctcagcctcctgagtagctgggattacaggcatgcaccaccttgcccagctaattttttaatttttttagtagagacaggatttcaccatgttggccaggctggtctcgaactcctgacctcagatgatctgtgcgccttggcctcccaaagtgctgggattacaggcgttgagccaccgcgcctggcccaaatatgtcaatattttacataaatagataattttgtctctatatagctacatatgtagtctgttttctgaaccatctgaaaatacattggagacacacctgcgaccacaccaccttatctctaaatcctccttgtgtatttctgaggaacaaggacattctcttgcacaaacagtaagtaaaagacacaagccaaaaagctattatacacacactgataacactaatataacactcctctctaacccacagctcattttcagagcttgttcattgctctggtcatgtccttatactatttcttttcctatttctttgcctcactgcatttagttgtcatgattctttggcctccaaatggtcctgtctcactcatttcattccgtgaatttttgcttcagtgtcacatacatgcagaaagtgctcacgtcaatatccagcttagtgaatttccacaaagtcaacatacctgttactggctttgaatggcatttgtatgtgacattttttacaaaatgaatctctttgttatcagaataggtgaatcgcgtgggtgagcccagcgtacagatgtgcagccagccatggctatgggtccacaagacaggggctgtctgtggttttgatggaaggatctacagggctcccttttagttcaggttttacttcctggccctgtggactcctgtggcctcttctacccatttcagagtagccatttgatgtgttttcataattgaattaagctaaacatgaaaagcagattctaaaactcagccttaactccaggactcctcaagtacacgtcaactggacccagacaagtttctcatctgagtcaaaatgctgtgacccagaacagggaaagggctttcacatagacacatttcatatgagcattgcttaaagacacaaaggaaggaagcctggggttcaactgtgctctcaccaccccagaacctgatttggtctcctgctgcaggtccatgctttttaccaggccagacccctctccaggggcatctcagccagttcacctggctccaggaggcctgttcccatcaggaaaagcccctgcatccattgctgggatggtcatttcttttttctttttctttttcttttttttttttttttttttgagatgaagtctcactcccatcgcccaggctggagtgccatgctgcgatttcggctcactgcaacttccgcctccggagttcaaacgattccactgtctcagcctcccaaatagctgggattacaggcgcctgccaccatgcccagctaatttttgtatttttagtagagacggggtttcaccatgttggccaggccagtctcaaactcctgagctcaagtgatccactcgcctcagcctcccaaagtgctgggattacaggcgtgagctaccacgaccacgccgggatggtcatttctaaccacctttttgggtgaacagcaggtttttcttctccatcctgaatgtttgatgtcactaggaaatggaaaaccccggggtgtgggaaaggcacagctgaggaagctgcatgttgtccacagcatcaagaggtgccatgagcgtgcggtgcacaggctgagcctcagtccatgcgcatgggtccagagaaagtgctgcgaggtcctcttcacagttagggccctcctgggctttgcctctgattactgtcattttcttggaggagcccagaatttagaagctggagatgggttcgtatagatcattttctcaagagaaggtctccatgacatatattcataaacaaaaagaaactcttctaccttgttttctatgaagttattttctagggattctgttttgttgtcgttgttcacactgtagctctcagatcttactgttttttttttaattgtgataaagcatacataacataaaatttaccattttaagcatttttaaccatgttttttaagctcaccattttaagcactttagtgatggtgtctcactgtgttgcccaggctgttctcaaactcctaggctcaagccatcttcctgccttgacttctgaaagtgctgagattacagacatgagccaccatgcccagtcacattttaaacatttttaaatgtacaattctgtggcattaagtacattcatattgttgtgcaaccatcaccaccatccatttccagaactcctttcatcttgcagaattgaaactctatctattaaataattccccattcctccttttcctcaacccctggtaactacccttctgcttcctgtttctatgagtttgactcctctcggtacttcctacaagtggaatcatacagtgtttgtccttctgtaactggcttatttcacttagcttaatgtcctcaaagtttatcctttttgtagcatatgttataattttcttcctttttaaggctgaataatattccattgtatgagaagaccacattttgcttattcattcatccatcagcggacactgggtgcttctaccttttgactgtgggaaataatgctgctatgaatgtggattagaacctgtttttaaggaagattatttttttctcttgccccgaataaaaatattaaaacctatgtgattaagggggcccatctgcccataggcatatgcacacgtgcgttgtgatggggtgcgtgtgaagttgaatctgaattttgtgaaatgcaactaccagagtttgcggtctaggagagccaggtggctttaataacagtattatcagttcagtgatcagacgggcttactgagatgtcaagtgagttagatcaagcaaactagttgtcagggttactactgtctttaaccactcacctgatgcttgtttcttattgtctgtctcattttttcagtcacattgcaagccttttgggggatagaaataatatcttatgcttcttttggtgtctagttaggctattaccctaaaggtagcaggtcttcaataatgttgacaatggtgtgagttgacaatgactcacaccaaatttgcctgtctgcacacgctctgcattgttctgtggtgttcctgtatgactttcccagtatgtactttcccaccatcagaaggacattgcatcaaaaaaatttgcattaaacagttgctgctctcgtgtttgaagctgggcagctgaattaaattagtgaatcgatgtgttaatcaattgcaagagccaaatttaacaaatataaactcagcacccactatgtagccagctggacgagacactggatataccgacctgggaaagaattggtcttgtggttggggctctcacactccagtggaaccttgttcacagtgtggtctgcccgtcagccatggagtttgctaaaaatgcagactctcaggccctacggaatgcctctgaatcagaacctgcaccttcaccaggtccctaggtcatgcgtgtgcacattccagtttgagaaacaccagtcttgtgaatgttatcctgttagctatatcctaaatgataacaaagggtgttttgtgtgtgtcagggagagatgagactaaggtggcactgggaaactgtgcccagttctggtcactacaacctcaatgagagcagaacagcacaagagacccctctgtggccattccctaagaccttcgggatgacagcagtgcagctgggagaaaaggccctacgggtagtgaaggtatctgactgcctaagatggagcgaatcccagcagggatttcctgctctgaatttatagtaaaaagaaaaacattgtttgggttcctccagtagcagagacagaatacgaatgcaagtagtctattctgtgttgagtgatcacagaaagttcatgtgggagagtaggggagtgagacaggaaggggaggcagccaatacatggtgcaatcccactggggacctctgagagactgtgtgggggcatccaagttgttccacataagagcgaggcagctggggtgtttgtgcacccactgccatccctccttggctgagggctgccctggggtattaactccccagcactgtggtctgatctgctcagcactcactcccagccacagagcttcctcagctgtgggcagagacttccaggtgcctgcagtagagccatcacaacagaagaaaacggtgacttccaagggttgtgggcagagcactcacagtctctgctccatgtgtcccatctggattaagaagtcaagggtgtctcagcagatgtccgcatcagagcgcaggttccaaatgaggaacaaacctttgcatttcagtaaatttcaaatcttagtgactcatcccctcagagtaactaatcatcttcacaagaccgaaaatggctgagcttcatatttgcttataatccaaattcccttttcatacccactctgctctcttccttccctaaaccaactctatgtgctcagaggacactgacaagctcaatttacagaaaattttttgtcattttctgtttcaaaatttcccttctgatattgcatgctacagattcatctcccctatccaattcctttcactgtgaacccttactccattctttcctgttttgttttttaattaaaactgaaattctggccgagcgctgtggctcacgcctgtaatcccagcactttgggaggccgaggcgagtggatcacgaggtcaagagaccgagaccatcctggccaacatggtgaagccctgaatctactaaaaatacaaaaattagctgagtatggtggcacgcgcctgtagtcccagctactcgggaggctgaggcaggagaatcgcttgaacctgagaggcggagattgcagtgagctgagatagtgccattgcactccagcctggtgacagagtgagactccatctcagaaaaaacaaacaaacaaacaaaactgaaattccaaatacagcagttactgtccccaggaacactgctttaagtttgcatttctttaagagtttgggggctgggtgtagtggctcacgcccataatcctagtactttgggaaaccaaagcgggaggattgcctgaggccaggagtttgagtccatcctggacaaactagcgagattccatctgtacaagaaataaaaatattagctgggcgtggtggcacacacctctggttccagctactcaggaggctgagttgagaggatcgctttagcctgggagctcaaggctgcactccagctccagcctgggcgacagagtgagatcctgtccaaaaaataaaaaataaagagttttgcagaccactgctccccagaaatgatcatcaacagaaagccctaaagccagtaggtttggggaaccccgcatactttattcactccctggagaccaaccctggacatcagcatctgaaaagttctgaggagtcttcagtgacctcattttatcgaatgtttaatgtgcttccactgttgttcgagcagtagtgtttgtattgaaatcgtgcctgttcacatcctacactgcttgtgttgggtggaaaccacttggggagatgctgcttgatatacagatcctggctccatctgtgcatttgaaattcataggcatctggagacagtggcatagaagcagtgggcgcaggaaaagtacaactcagagtttacaacgagaaaaagtgaaaaccacctgacacatagctaatgttttagaatgaaaagtgacttccattccaattgaagtcagcccctgctgtgtaattaagcagatatttaaaaaatttaaaaaaaaaaaaggcaggcggagtgggtaaggtacgactccaaatggcaaagccccagcttcagggagggagagggcccaggagtgaggaacataattaaatagctgtgccacggtcatccaccgaatgccttatttcctttgttttaccaagaattgcaccaaccaagtgatctgttgccagccttccatatggcaaatgtaagcacctgtccagagtactaaatggctgagcccaggagctccagaggaaacttgtctgattgctctgctgccaattccaggctctctgttaattccatccatcaaattattctttttcttctatttttcctaaaatgataatagttatttttactgtgaaatttaaaaagtgtaaagaagaaaagagacctaaattgtaccacctctaatcactccactcgggaatgaagccagtgagcatcttgacactaatgcattcagatttttgttctgtctgtgattcgactatattatgtaaatccatacataagtgcagccacaactattacttaagtgagctcagagaacacatacttttcacaacttgtttatttccacttaataacatatcactatattgatatattgacatacaatatatcgatatatactgtacatctcaagaaatatgttttaaaggcggaatcgccttttaaaggcggaatagcattccatcatattggggtacacactttatttacccagtccacagctgtttgacatttagcactttttcccctgttcactatcataaatgatattgcccaaagcattcttttacatgtatctgattatttctttgggtcaattcctagaagtagaaatgctgaatccaacagttttcatactttaatgttgatatacacattcagattgtcttctagaaagagcaagtcatcttttttctctagtgcttgtagaaaacccagtgaagacaagtggtaagaagccagaaatggtaaaagggaagtgaatgtgactgtgacacccacgccagtgcattccggaaaggcaaagtgggacagctggggggacaccaagttagagccagaagaggcactggaaacctgctcgtctattttaagcttaaggaaaccaaaggccagaaaggttaagcaacctcccacccaaggccaaggtcccatagcttagatggatagctgtaaacttcagggataattttcaaaaaacgaaaaaacgtgactctcatacaaatacattgtgtgtgtgtgtgtgtgtgtgtgtgtgtgtgtgtgtgtgtcaaagattgatttaactcattaatgagatcaacaggacattaaagctggctccaaatggggcaaagattgggaaagactcagtgggcaaaagaataacaccttaaacgaactttgtcatctactatgagccacttttgcatatctacctttgaaggttagagataagcttgctattgtcagcattcaaccactttttgaccttcaaacaactcaacttcaaaaggtacaacccaatacaaacctggctaaagacataaaaggcaatacaattaaaacctctggggttctcttttctactggacaaacatcatttgcaatttacagaccttccagaagttagcatctgactttacggagtctgggccttaattaaaaaaaaaaaaaaaatcagacaaaatacaaaatgacatctgggatgacacttaggtagatgtgttacgcagagcccaagtatgcctttgcaagggaatattttgtgctttattgaagttggcatagttatatttgctgtaagaacagcctttggtggctgaactatgtgtgggagaacaaggttgatattcacggcaaatctactcaagctactctccaatggagtttctctgaaggctgggaggctggaaggccccgcagtgaattgttgctctcacttctcatggagtgggctccaggctttgtgtttccccaggaagctgaggtggagcaactgtttgccatgtgggaatctgctcttgtcagccttccagctgggggatgacagatgccgtgcgagagtcccggttatatccagagagggttttagggagagctcaggatgctggaaggcctgccggtcatctgccagtttctattttgtaaattccaggatgctggtccccacacagcatgtttgtcactaacaatgcaaccaaacaagtcactaatatttgacctatacacctgcaggccccttcaacctgagctctatgaagacataagtcagcacatttcagttataagattttcaaaatgttatccctgaaatcatttatatcctgtagtcaatggtgtataaaagtggcagggctctttttcttgatactatataaaataagagtgtgtgttatcattaatagtatcttaaatttgtggccaggtgcagtggctcacaccataatccccgtaccttgggagatcaaggcgggcagatcacttgagctcaggagttcaagaccagcctggccaacatggtgaaaccccgtctctactataaatacaaaaattagccaggcgtggtggcatacacctgtaatcctagctacttgggaggttgaggcagaaggattgcttgaacccagaaggtggaggctgcagtgagccgagatcatgccactgcactccagcctggacaacagagctcagaaaataaaaaataaaataaataaaaatgtgaaagtgcacattatgtatttttcttccctattgtagacccaaagcctgatgcttaataagtactctataaacacatcttaaaaatattaagcaaaagatgcaagatctaactgaaaacaccaatgctaaaactaactggggctgccgaaagccttagtgaccactcttagaaagaacgtcatcccaggccgggcgcagtggctcacgcctgtaatcccagcactttgggaggccgaggcgggcagatcacaaggtcagaagatcaagaccatcctggctaacacggtgaaaccccgtctctactaaaaatacaaaaaaaattagccaggcatggtggcgggcgcctatagtcccagctacttgggaggctgaggcaggagaatggcgtgaacccgggagggggagcttgcagtgagctgagatcgcgccactgcactccagtctgggcgacagagcgagactctgtctcaaaaaaaaaaaaaaaaaggaaaaacttcatcccttgtggtacttcaatcatttcacttattactgaacctaaaaatgcaaagccacaggcaggagtatggtgccatctgtgactgccaaggtcattgaataatccagaggtcatggagtaatctaaggcaacactggactcagacaactgatgcaatagatcaaggcctcagcaggaggactgtttcaagatacagccacacacgctgcttccgtagttcacacattgaactgcagatactacacgcaccttttacaacttatttttctttctctgtgagcatgcgccaaattgaaggttatatcagagtgtttgctctgcagtgtaatttcaaacatagttcttttgttttcgtttttgttttctttgagacagagtctcgctgtgttgcccaggctggagcacagtggcgtgatcatggctcactggcaacctccaccccccaagttcaagcgattctcctgtctcagcccctgagtagctgggactacaggtgtgcaccatgtccagctaatttttgtatttttagtggagacggggtttcaccatgttggccaggctggtcttgaactcctgacctcaagtgatccacctgcctctgcctcccaaactgctgggattagaggcgtgagccgccatgcccagccgaaacagttttttgggttgtttgtttgtttgtttgtttgttttttaataaaaacaactctgggctaagcctctgggagtgccactgatcaggggtgccgcctaaacagggatgtcctcccggcccttcacagcctctcccatgtgtggtgaggagtgcctggcaaggtggagcccactttgatctcttttgtatgttgagaggagcagtttacaatttagttattaattgtttgaaagcaaacgttttacactcaatgagaacttcccccagaatcagaagagaaccgctgcctcctggatgtgcaagcacattggtgtttttgggtggtggataattgaaaactcgagcagtctctttttagtggatgccacacgtcagcaactttcccatcccatccagctgaggttataatggattggatccgagctccgcctcctctctgtcctgatttaccccctgcctggcacaaaaatgaacagagaagtcaccaagaggaaggcggagagggaagagcacttgattcactcaacaactaatgtgtgccagggactgctctgagctgaggagactgcagtgaaccaaaggacagcattcctgctccgtggaattcgcatccaggtgggggcgtttgggagcatctctggctccaggaagaacccaccgagcggcgccaagcaggaaggctgggggtgtcctaggtcgggttccccagaaacaggcccagagccgaagaactgtgtgaaagtggctatcaggaagtgctcccaagagaaacgcatggtgaagtgggggttggagcctggaggggaaagagatcagagatcagaggtccaatatcaggtgaagtcccctaagggtaaatttggatctgtcggttgtttgtttgtttgtttgtttgtttgtttgtttgtgacagggtctctctctgtcacccaggctggagtgcagcggcacaatctcagctcactgcaacctctgcctcctgggttcaagcgattctgctgcctcagcctccagaacagctgagattacaggcgcatgccaccatgcccagctaatctttgtatttttagtagagatggtgtttcaccatattggccaggctagtcttgaactcctgacctcaagtgatctattcgcctcggcctcccaaactgctaggattacaggcgtgagccactgctccccgcctgggtccgtcttaaagggagcttgaggacaatgtaggtctcacctcaattatcccaatcaggagtggggagctaggatatttacaccccaacacccagcttcactggtcaaggactgaccctggagacccttcatggtctctgcaccaaacaaagccagctgtgccagcctgaaccaccagctttgggggatgcgcttctcttgtcctgaccactctttctctggaggtgtgagaggccccctctggcagaagtgctggtctcaattgaggccactgtgcagcctgatgtttctagggattttcagatctgaaaaaagcccaagataaaaaggtccaagatctgaaaaaggtccaagataaaaaaggtccatagctttccaaagctatggaaacctcgtcatcaatgccttgaggtcccccgaggaggtagcaccactcagtaggagtaccacgtgctccattttctgaggctctcctaatttcaaatattctgtccactgtaagtccatccatgcttctcagaccccatgtccctgtggaatgaaagtgcccatggggaccataaggtggggagcttccctcctgctcccaggaagcgcccaaagaccagtgtccccagcagatacaattagccaatgcattctgccacctggaccccaccccatactgcagcattcgtttaaaccatacctttcactcgcctgtctttggaagagggtgtaagtcactcagccctccccccaccagcacactacagatgctcgcctgctgggggctctgccagcataacttccgtgaactctcggcaaccttggacgcagccttcatcctgtcctccttttaagcttgaggaaatttaaggggtcagattatttactcaaggacacactgcttagagcagcagagatgataacattccaagtaggcatttcagtcaaaattctgcttttaaatactaagttggccaagaggccagcgcggtagctcacgcctgtaatcgcagcactttgggaggctgaggcgggtggatcacaaggtcaggagttcgagaccagcctggccagtatgttgaaaccccatctctactaaaaatacaaaaattagccaggtgtggtggcgggcgcctgtagtctcagctacttgggagactgaggcaggagaatcccttgaacccaggaggcagaggttgcagtgagccgagattgtgccactgtactccagcctgggagatggagcgagactgtgtctcaaaataaaataaataaaataaaataaaataaaataaaataaaataaaataaaataaataaaataaaataaaataaatattggctgagaggtgtggttcacacctgtaatcccagcactttgggaggccaaggtgggaggattacttgagcccaggagtttgagaccagcttgggcaacacagcaagactccatctctatttttaaaaatagacaaatattaaattatccattgtgtttatttcctttagatactaccatttactaattagaactaaaattataaagttattcacaacaaaatactcatttcacttaactcagaggatgggggtggatggcttattacctttttttctacatactgttatttgaggtataaggagaaaaagggaattaaaagatagtgaacgttgctttttggtaaatagaacatcccgattttgactaaggtggtgtcttgaaccaacagggctaggatagacaattgaataaatgctgttgagctcatttgctgtccatttgcaatgaaaaatgaagggcagagttctgtttcaaacctccacctcttcatacccccacctttatacccccaccttcgtatccccaccttccatacccccaccttccttacccccaccttccataccccactttcatacccccaccttcatacccccactttccatacccctaccttcattccccaccttttcatacccccaccttcataccctacctctttatacccccaccttcatacccacaccttcataccccaccttcatacccccaactttcatacccccaccttccataccccaccttcaaacccccacttttgtacccccaccttcatatccccacctttcataccccacctccatactccaccttcatacccccaccttcataccgcacctcttcataccccacctcttcatacccccaccttcataccctcaccttcgtaccccacctcttcataccccacctcttcataaccctactttcatacccccaccttcataccctcaccttcataccctcaccttcatacccccaccttcataccccaccttcatacccccaccttcacactcccaccttcgttcccgacctcttcataccccctcttcataccccaccttcatacccccaccttcattccccaccccttcataccccaccccttcataatccacctcttcataccccccaccttcgtacccccaccttccataccccaccttccttacccccactttcatacccccacctcttcgtttcatatccccacctcttttttttttttttttttttttttttttttttttttttttgagacggagttttgctcttgttgcccaggctgtagtgcagtggtgcaatctcggctcacagcaacctctgcctcctgggttaaagagatgctcctgcctcagccttccaagtagctgggattacaggcatatgccaccatgcccagctaattttgtatttttagtagagatagggtttctccaagttggtcaggctggtctcaaactcccgacctcaggtgatccacccgcctcggcctcccaaagtgctgggattacaggcgtgagccactgcgcccggcctcccccacctctttgtgctcctcctctcaccactcctcagcctttgggtaaatttgtggaaaaaaaaaaaaaaaaagctgtcctctgggcacattccttagcctgcagaaggtgcctcaggcagacagagccaacccagggtatagtgcttaacaggctgggggaacccagctctggccatgttgtagttgttccttgctctctagtcctgactttgcaccatgcacaaaactaaattccagatgaatgaaaggactacaaataaataaatacatcatatataaacaggcaaagctgtatatactgtataagtcttagcagaaaataaaggagactttattacttcaagatgaggaacttctttctaggcaagggccaataagcaatggccatattgaaaacttggataaatttgattctatcatcattaaaagcttaagaaaatttaaaaggcagaaaaacaatgaaagagatcatatgtgaaacatatcagacaatggattcatatacacaaccaacttatgcaacttaattttaaaaaatcaagaaaccacaaaataggcaacagatgaatgaaaaggcaattccttgcaagaggaaatagaaataaacgataaaaatataatcagggcaaagcaaatgaaaacaaaaattatttctgctcatcagattggtctgcttaaatgtttgataatatcaatcattgacaagcagcgtggacactttcacagatggcaggggcagtgcagaagggcacagccacccggggagcaatgtggcaccagctcagaacctgctacatgcataggctccagcattttctctgaggtttcacacagtgcacaagggaacacacacacaggtgaccatcacagccctgcctgtgatagcaaaactctggaaacaactaagcctctatcaaaatagaatggatatgtggattgtggtatatccctatggtggaaaaccgttcccacttacaacaaatgaaccagggcttcgtgtatcagtgtggataaacctcattacaatttgtcgagtgaaattagtaagccagtacaattcctttggttggagaaaacacagatgataccattcaaggatgatacacacaaaactgataacagtggttacatctgagtaggtgaaggagattatgggtgatggtcaagggagattacttttaagtacaatcatttattttctttaattaaaatatattcatttgtgacatttgtaattacaattaaatatcaaaaatataaatgcaaacacccttgggaggagtaatacacaaagttaaaagaaaagaagcaatgttctccaaaggtgtgcttgcatcattgtccaggtgcccctctgcaagtgaaggggaaaagcctccattacgtttttgttttccaggtgacagttcctgggggcaaaggtcatttgaaagtttggaggaagctcattattttccagactagtttagaaaaaccccaacatgagaggtacccaccacaccaggaggctcctcagccaagcagaagcacatggtcgagggaactgtttgggtaatgcggtttttttaggatctggaggtagatctgataccgcagagctgattcccggattataaatgcttaccacacctcaaggccaagttgatgcacttggggaatggaaattccatagctgggagccaaggacttgacttttcccacaccctaagtttcaagtcttcaacatatcagcaacacatcccttttcaaaccactgataacattcctgaatgagacttggaatttgaagagcgctgtatcaggacttgtgctataagcactttcttatttgacttttacttgaccttcaagagaatttttctccttttatctaaccctaaaagaaagaaaacaagacttggggttcctcccttttccctcctccctgcagcttcctatgcatgcaaagaagcatacaacaacttttctctctattaggggaaattcagcgcctagtgggcaaatctctaggttagaggcttctgagcagacaggcaggaggagattggactccgcggacattgtttctttgtagtcccaggtctctgctgctggtgattaaatggcctctttccaggaggggaggtacatgaatccattttaagtgtcttttagtatcagctctctggttaataacaattgccattaatataaagagataatttgttacttatttattttaagagatggggtctcactctgttacctaggctggagtgcagtggcaccgtcatggctcactgcagccttgaactcctgggctcaagtgagccaccttcctcagcctcctgagtagctgggactacaaggcacatgccaccatgcctgggtaattttttttttctttttggagatggagtctcactctgttgcccaggctagagtgcagtggcgtgatcttggctcactgcaacctctgtctcccaggttcaagtaattctcttgcctcagcctcctgagtagctgggactacaggtgcatgccgccatgcccaactaattttttgtattttagtagagacggggttccactgtgttgcccaggctggtctgaaactcctgagttcaggcaatctgcccaccttggcctccaaaagtgctaagattacaagcgtgagccaccacgcccagccaattttttacttttttgtagagccaaggtctctctatgttgcttaggctggtctcaaactcctgggctcaagtgatcctcctgcctcagactcccacagcactgggattataggggtaggctactgctcccggccaagagatcatttaaataggaagaggattagagagtatttaggtgcctattgaagtgttttgttttgtttttgagatggagtctcactctgtagcccaggctggagtgcagtggtatgacctcggctcactgcaacctccaccacctgggttcaagtgattctcctgcctccgccttcggagtagctgggactataggtgcacaccaccatgcccggctaatttttgtatttttagtagagacagggtttcaccatgttggccaggctggtttcgaactcctgacttcaggtcatctgcccacctcagcctcccaaaatgttgggattacaggcgtgagccactgtgcccgacctgttgcagtgttttaatctcattgtcctttttattcctccaatgaccttcccttgacatcatcagccctagctttggggatttaaggatgagggcacccaaatgggtcgcccaaggcgacccagccaaccggggcccgagacaggatttgaagacagatttttctgagccaaaagctggtatgcctacccctactcccagctgtcaggtcaccagtcagagcttcaggccacaccgcctcgaaattgcacaagttgctgcctgaagaatggccccttggatgaggtccccgcctactgagaaattatgcagaatgattacaaaatggtacaaattactgtagactcctgcaccagactggaactcagcaggcccagccttgcccaggcccagccctgggtgtgacctcaaagggctgggaaagaacttgggccttctccagttattctcttgcccttggccaggatgccagctcttatgcaggagcactcaggtgaacacctcaggcttctcaaggtgtgttatgcacgaatgcaggacgagggagtggacccaacccctgacctgccttcctctccctcttgtggtcaccagcaccccctcttcttccctggaagtccccagccaggccagcagcccactctctcccagcttctaaaggcaacacatcacccctctgtcctgctgtacatgcctgcagggaaaaacaaacacaggcaatgccccggcaagacctccgttgaggtctgctgtgctgtataaggataggtggctatcccttgggttggggtctttgtcactgcttgtgggattttctgggaatgatgcagctgtgctgggtgtttgatgtaagaaccatggtctcaccaactttgtgccttgtcagccttgtcctatctgaccctctggctgcactgaatcacaggtggctctgccaccactttcccaggtgtccacagacgagcaggggtgtagtgagcagcactcactcaccagctttgcagatgtttagacagcccctccccatgcttgcaggaattctgcacaggtacagggatgtgttagaggctgggattgtgtaagtgggtctggagaaacttcagttagtagcaccagttttttgtgtttttgtttttgggttttgtttgtttgtttgtttgtttgttttggtctggtttgagacagagtctcgctctgtcacccaggctggagtgcagtggctcaatctgggctcactgcaacctctgcctcccgggttcaagcgattctcctccctcagcctcccaagtagctggaattataggcacatgccaccatacccagcgaatttttgcatttttagtagagatgggattttatcatgttggcgaggctggtttcaaactcctgacctcaagtgaaccgcccacctcagcctccggaagtgctgggattacaggcatgagccaccacactgggcctgtagcaccaactgctattggctttgtcatgggaaagctgacattaaaactggcctcctttgttgggtgacaagttatttctgccctcaaagaaggaaattttgaagaagcaagtgtaagggatgagattgaaagtctgtgagaattagaaacaaacaaataaatcaacacaaacttgtccaaaaacaacttcaaaaaaacacccaaaatcccttcagtgggacaaaatccaaccgtcagaggggaggaagtgttttgtgatgctaactgctgctggcggagggcccagtgggtatatacacatgattctgagaggcaggactggccctggaacactaaactctggtccatttgtgagattaaatccctctgcactctgggacaagtgagtcaggactgaatggaaggggagggaaaagttgctgggggctggggctgggggggatgcgagggaccaaaaaaaagtccccacatccagcagggaagggtccacagcgatccagccaagtgcaacctctgtgcttgtccaccctcgtgccttggggtcatggtgccttcctctgcactagagataggtggcatggcaatggtgccttcctctgcactagagataggtggcatggcatgattggtgacttggcatgggagtgccgctaagtgacagccacagacaccgtcagcttcttgtgtgtggccagatgtagagaaggaattgaggaggaaacttggaggtctggagatccagccaacagcatcggcaagagcggtacccagacaaaaacagcctggctgaagggaatcaactgatgcccattctgatgagaatcaaggccatttggggtttttatgttcaaatcagtatgatggttgtgaaggtaaccaaagtgtggagagggaaatgtacccagtgacggggcttcctgctggggtgggagtcctctctttgaggtttgccagaggctgtggccggccctccctcacaaggccttctgcttctgataggtgtgtggctctcctgtttggggccacagccacggtccagaatgaagcagggcctagtcccagggtggtggggcttcagcagacgtacccaaactcccctcaaccccttccttgcttctacctttttagtcccttcactccttccattttcatacacaccaccctttctttttcttgttttcctaaaattttgtttacaaagtactttaagcatacagaaaaccacacaccatattaaaatacccatcactcagcactgtcaaatgtcatcatttcgccatttcattttaagaaataaaatctttccaggcacggtggtgcctatctgcaatcccagagctttgggagaccaaggtgggaggattgcttgaggccaggagttcaagaccagcctgcacaacatggtgagaaagtgtctctacaaaataaatacataaataaaatctcacacgtgaccgagcccattgacctgtgaacactttcatccatttctcctgtctagaggtaaccactatcctggattaggattataaccccatacatattaggatagcctttgtgtctatgtgtgtatctataaacatacagtacagttttgcatgcatttataattttaataatataacatgtaacagtattttatttttaaaaaaactttttatagagacgatctcactatgttgtccaggctggtctccaactcctggcctcaagcagttctcccaccttggcctcccaaaatgctgagattacaggcatgagctaccacatctggcctaataatatattttaaaacctaacatagacgaaatagtattctttcaacatgttatcaatataaacattatatggatacattttatttgttaatttgttatgtcatagttgtacatattttggggtgtacaggtgatattttaatatgcaatatgtaatgagcaaatcagggtaactgggatatccatccatgtatctttttccttgtgttgggaacgtttgcatggttttaaacttcacatgctgtatataatgcttctcgatttgccttttttttttttttttctgctttcaaaaaaagccttttgggcttttatgtttatacatgtgttcatacatacagttctggttcattaatttttaactgctatgtagcattttatactcaattaatgtatccattctcctcttaatgaacccttaggtgttctcacaaataatggtgcaacaaatattcttgcaaaggtatctttgggcccacgtgcaagtttagtctctaaagtacacatataggtttgtgtatctttaaccctacaagatgttgccaaattgctttccaaagtagctctgggggtaatattcctccagcagtgtaagaggtgccatggtttgaatgtcacctctaaaactcatgttgaaatttaattgccattgtaacggtcttaaaaggtgagacctttaacagatcattaggtcatgagggctctgccctcacaaatgaattaatgccgttatcttggtagcgggttagttttcaaagacgtggtttcctgacaaaaagaatgagcttggccgatttcctctccctgtctccactcacttctgccttccgccacgggatgactcttaccagatgccagagtcatgctctcggactttccagcttccagaaccatgagccaaataaacttctgttcttaataaattagccagtctgtagtattctgttatagcaacaggaaacagagaaagacaagggggatcctgttttcccacatcctagagtatttggcattgtcagactttttaaaaaaactttgccacagagatatgtataaaataggatctcctaatcatttcctctctcgaggccccagtgcttctggaagctccccctctggtccttactgcagtcacaggcaccgaggggatggatcaagcatgaagggcttggctggcttcccttcttctgacctctaagtcctgggagtgtccagagctatctgctgggcccccttctccatcgacctctctccttagataatctctccctgccacagtgctttagaatgccagccacacatgccagtgacttccaaacagaaaaatctccatccagagtgtcagaagctacttcacagatttatttgatggctgataaacaactgaaataaatttaatctgcccgaagttcaatgcagtttccccctcaagtctaattcttccccattgctcccatctcagtcaagggcaatgccatttattaattgctcaaaccaaacacttcggagccatccttgattattctctttctaccacccccacattcaatccatcaaattatatcaatttctatgtcaaattgttcctaaattcccccgttctttctagttccaccactaccacctcggtccaagctgcatcatctcttgcctagaccactgtagttgctcctaactggtcttcctgtttctcatcttgccctttccaaccacctcagtgccaaggtgatcggtttagaccataaaacagatgtaaaatggctttctcctacttaaggccttccaatggttcttatcatggaagactcaaggtggtgaataccatgatctacaaagttggcaagatctgatccctgcctgcctctcctcctgcacaccttcctggcctccagaactttctctccatgtggagggctcttcctttgatcttttcatggcattcttgtcattcaaggctctatcgcttaaaaaagacttgccctgaccaacccgccctgatctgtttggcccctttgttgctcccacagcattaccttcacctgtcttcattctggaactgctcagtgcttggttctggtgtctttctgccccaccagaatctcatctccatgagaactgagatcttctcagctccactccccatttgcagtacctggcatgaagcgggagcccataaaagtttgtcgaaatagtgagtgaatagatggggtcacattttagaacaagctttaagcgcaagtgaagtttccctcccagagtctgggtgggataaaagctacctgagacaagacaacatttctctttagtgagaacagtgctcaaatttcttagcctcaggaccccttgatgctctttaaaattattattgttgttgttatttttttgagatggagcctcactctgtcgcccaggctggagtgcagtggcatgatcttggctcactgcaacctccatctcctgggttcaagtgattctcctacctcagcctctggagtagctgggactacaggcacgcaccaccacgcctggctaatttttttgtatttatgtacagatggggttttaccatgttggccaggctggtcttgaactcctgacctcaagtgatctgcctgcctcggcctcccaaagtgctgggattacaggcaagagccgctatgcctggccaatgctcttaaaaattattgaggatcccaaagaacttatgtttgtatggatcatatctataaatagttgccatcttagaaattaaaatgaaggaatttaataacgcttattttaaaacaataatggacctgttacctgttaatgtaaataacgtttgtatggaaaattactatgttttcaaaaaatagtgagcagagtggcacccttgagaacagccactgtacacttacagtgcctagtacgcgccaggaaagactctgttgaatgagtgaataggagggtgaaagattttagaccagcctgaagggtcagatgcaggtgcatggataggtggggatctgagatggggccgccttttcccctagatggccctggggcccactcccctcctccccactcatccaccccagcctcactcagtcctttctcttccctttccccaacaatcttctctccacagcagtgcaaagaatagaacaagaaatcattttgatgtcgtcagaaatcaatatgtaagctggatatatcttttaaataaactcatttctataacaaaataatcattgtatgaatttcagtccttcaaagggggttcctttggagggtttcccttgccaaatgaatattgaggcccggttttgccaggatgtatttattcccgtctatattcatgttgagaaagctaactgggtgttatattatcttccttattacaatactgaaacctaacaaactgggtgtcatattcttttccttattacaataccgaaacctaagttcttcccctttctaaggagaagctgcctcctccccctttattttttcctctggctagaggaaattcacagagccaagattaaaaaaaaaaaaaaagaaatagaaaaagatggtcatctctgttcctattgaaaagcctgagttccccgggcgctgtgggcatgccacgcctctccacttcctgacgtcatactatttttgtctttgaatagctcattgacacaattgcctcggagatcggagaactgaaacaggagatggtgcggacagatgtcaacctggaaaatggcctggaacccgctgaaacccacaggtgaccagagacacggttaggtgatgggtgcgagaaagggatcgagtgaaccctggcactgccaagggctgacttgcagtcactcctcagaagtctgggagctgggagtgtggtagcagctctagatgaaatcctctgtaggaggtgggagtggcctaggaactagttgtctgcttgtttattttaatcactttgaaggcacttgaactttatactctctcaattcctcctggcaccagaacccggaaacctaaaattgtctgtgccatatccacctactcccaatgatggaaacagtaatgcagcaagatccagcgtgtgcaaagtagaattcagtgtagccgtgtgagtctccagaaggcttacaggggagcagctaaagaggatggactcattttgcattctcaggtcagagaaaaaccccagcagtctccaaaaaaccattaacctgaaaagccgtgcagtgattggaaactggatgtggttgtaaattcgatacaaagggaaggcggcgtgctgtgctgttgaaggcgatacctgtgcacatactgcacaccgtctgaataggaggcaagggactggtctgtacctggagaaagggggtgcaaaggtcggggggtggtgggaagttgaaggtgacttcttccaactttgatgctaacaagataacaatataatggctataaaaagacacagacacttcgtgccttagaggccagatttgttaacagcttcccctttctcccagaaagtggggctgagcctgcctggagcagtgtgaggctgagatttatggagtaggttttgcctgcaagtcatgcaacaggcaggccagccagatggttctggttgtccaggcaagtttcaaaccagcccgactagttccgccatacgctgacgggagagagcaacatcccagggaggcacttgcagctggaaggtggtactttgatacccgatgtctctgggggaacagcactcacccttaattctctgtgccttcctttcctttccttctctacaaaacgatgggggtgaaccagatggtccccctgctccttgcagcacacccagcattctatgattgttcttgacctcagtgtgaaagtcttattttttccccataaactagacaaatgcacaatgattttcaggtagtgactctctgcctcacctccagagtagtttcaaacatcgtggaactttagccagggaatttctctatcctgtgccttgttgagctaaaatttaattgggagtctaggctgataacaacagaaaagagagctttggtagcactgatttctttcatagccaggaaaggcggctctgtgagatcaaccccaagctccacagatgacagacacccagacacagagcggcggaaacctttcccctgcatataagcacaggggattttgggggtgtgagaaggacgttctgaacatgtgaggggccctcaagatcttgttttctgactccggtgggtattagagtgagagctgggtggttgcttaatctttaacatttccttccatcttttccttttcagaggtaagaataactgtaagcagtccacaacagccttttttcccagatgaatgtcactttgaatgctatgttgcttaattcatgaatttatacatttgcaaaggcattttatttggcttttttttaacagaaaagaaagaggaaaaagcaagatgagttgtctttatttaacaatatagatcatgttggccatgtggcaacactgttcatattaaactactgttctaagtcgcttatagcgactaacttacggaatcttcctagcacttccaggagggaaagctctttagggcctgcatttgactgatgtggaaactgtgtgctgtggggaaaaagctacacagttttggcttctgtgctggagtgtcttgctgattttttagaagtagtgagtttggttttaatttctccattttgtccaatggagctgtcaggagggccagttcagttatttctaagatcaaggaaaagcatagctgtggccacaattcagcctggcacagagcagcagccaaaggggagaggagggaagaggaaagcagaccagtaggtagcagagttgctttcagcaaaacccctggagaaagaagtggcgagcaccgcccgggcccctggctctgcacgtctgacggctgcaggaaatgcaccgccgtcagcttcctctgcagcttcgtactctgtgagtgtgagctgggatagggagtcgcctatcccaccacagccaccacgaaatgtctatggttccttagttgatggaataccagattaagcaccaagctagtccctaggttaggaatcactattactctagctgtgttagtgtttggttgctctttcgtgcttaatattgagataaccttgatctttaactttgtcttgtgccatggactccttctctgaataatcttttgaatgcataaaataacatatataggatgtcatgggaaaaacaattacagtgaagtccagtgatcagaatgtttcagtgtgtgtttcagcatgtgcttccatggcataggtgcttctgttttacatgtgacagataggcataaatgacacaatctctgtaacagctgtgacaacggtgaaacctctgtggtttctgttggtgacaaaatcacaggtcgtgatactactactgtggtttgttgcctacaatcaaaatggaaggaagttcattcagaatgaggctatggaaagtgaagatgtcagtttttggcccgatggccagtgcccacctcccgtcctgtctcctgtcagcgtcgtctgccatggtccatctgccctcctttttgggacatttgcttggcttggcttctgggaccccacacctccctgggatcctcttagctgtcctgctgctgcccccagtgccctggctggttcttctttatctccctgaactccagccctggagaacccagagatcacactttgatcccctccttttctttttttgtttgtttggtttttgtttgtttgttttgagacagagtctcactctgttacccaggctggagtgcagtggcacaatcacagctcactgcagccttgacctcctgggctcaagtgatcttcccgcctcagcctcccaagtagttggaagcacgggtgcccaccaccacacccagctaatttttttttttaatttttggtagagattggggtctctctgtgttgcccaggtgtgtctcagacccctaggctcaagggatcctcccacctcagcctcccaaattgctgggattacaagtgtgagccactgcgcctggctgagccactccttttcactcttcacacctttccttttctctctcccactaactttgtacaaggtactttaaaaaatatctgtgcctcagtgttctcctcattaaaatgggaataataacagagttacctcacagtgttgttgggaagattaagtgagttaatagctgtcaaggactcagcacagtgcctgacacgtggtaatagccacactatatgtagttttaaaaggtggtctgtggagtaatttcctaggttatcccacccagtcttgtggctctgataccatctatacattggttattcccaacttatactcccttggccaatcctctctttgagtccagaggttggtaaccaactgcccactcaggaagtgttccttcataggttcattccttcctgggtcttccccgtcccagtcaccatgcctccagcttcttgggccttgtactcatcaatggtgcctctattcctgtcataactgccctcctcccatccatctccaaatccaggcagctctaccttttatttttctttgagacagaatctcgctctgttgcctagagctggagtgcagtggtgacacgatctcagcctcctgcaacctctgcctcccaggttcaagcaattctcgtgcctcagcctcccaacatagctgggattacaggcatgtgccaaaatgcctggctaatttttgtaattttagtagagatggggtttcaccatgttggccagtctgatctcgaattcctggcctcaagtggtccacctgtctcagcctcccaaagtgctgggattacaggcatgagccaccgtgcttggcctctacctttaaatagatccaggatggaaccacttctcaccagcaccactgcagtagcccctgcctggtgcctctgcttctaccagttccactttctccaggctattagccaagcagcatggtgaaccttttagttcacctaagtccaagacacatctctcctttgttcaaagccttttgataattttgcatctaaaaccaaaattattaccatggccttcaagactctataagatgtgacaccccagcacccctctcctctgccatctcttctctagcattctctccccatcactcagctccagtcccactgacttccttgccaatgtggcccctgcctcctggcctttgtacttgcggttccttctgtctggcacatccttcccccaggaagccttcacccttgagccctccttttcttctacctcattacctggctttatgtttcttcatagaacttgtacacacaggacatatattcacttgcttcctgtccattctttcttttttttttttttcttggaaacagacttccactctatcgcctaggctggagtgcaatagtggtgtgatattggctcactgcaacctccacctcataggttcaagcaattcttatgcctccagcctcctgagtagctgggattacaggcacgcgccaccaccaccggctaagtttttgtattttagtggagacatttcatcatgttgcccaggctggtctttaactcctgagttcaggcaatccgcccgccttgacctcccaaagagttaggatcacaagcgtgtgccaccacacctggcctatctgtgcatttcctgcctcccaccactagaaggtaagctctgtgagaccagggactgggtctgtccttcaccctgggattgcagtgccagggacagtatctggcatagagcacgcactcgcaagtatttgttgaatggataaaggaaaggtgccaagccccttagtgattttaaagtattcttgcctcagagacctcttgcaggtggccaccaaccggtgcataaaaaaataaaaagttgaaaatgtgtgacaggcctaaggcttcctccctagcaaagaaatagggcagaggcccttcccccagtctccagttgtgcctccctgaccagttctaccatgagctattttaatctttggccaatagagtaggagctgattaaatctccctccatgcctctgctgatctaccaaatggaagcccgtaagccaggggcgagactgagggcttcttgctcctggttttctgctctctcccagtgtggtttcctgcttcctctcttcccactgcatccctgcaaagactggagagtatgggaacatgaaggcatttcactcccctctccctcccacatgattccacagtccattttcatttggcggaagcaggcctcttttgggtaggctcaccaggcctgaggtaggttccaccctcatcatcacttgaacccatcccctctaggctgagacaagtctctaaagatcactttatcctcaggcggaacagagggatccacagaacaacctccccagctattgtctgggcccaggctgcctctgcaggatccctggcatcctggctagagcaggtcagtgagaactgcagctcatcccttcctccactctcctgtagctgtcactcctgctgccacttcgctggtgtcctctagcccaagtggattgctgtgagatgcctgcggtcccatgtcttcactcctcctgccccaccacagaaccagacatgacacaggaaattcaaaaattccttggccagctcttctcaatgttacaatgtagcagctggtcatcacctttggcctcttctgggaagctctgagcttcccagtggctatgtgacagcattgacattataaccacaggaaacccagaaggctcctcccttgtacaattgttcacttcttcacttgcccagaggtgagaactgaagatgagaagggaagaatggtggccgcagcctggggaaagatgcccagagttccacttccttaagtctcaagagggacagttgtgaccacattagcgactctgtggctttttgaaccagatccaccttcacttggtgctgctttttaaataattttccactgaagtaaaacataactcagcaaaattgcacaaataagtatccagctagatgaaaatccacagagtaaacacatcacacatcgatggctttgctcacaaacctgttactgctacagggcaggccgtgtagcagcaacaggtttatggtgagacattttccggctatgtcactgaggattctctactatgattactttgatcaatttacccccaatcccctagaatatttccatatttcaactcaaccaggagtgtcctgaacatgatttcaatgaattctatgagggttgaccaactcttcgctacactatcaccaatgtagcaacaactaaactcaaattaaagaaaatatttaagccgggcagggtgactcacacctgtaatcccagcactttgggaggctgaggtgggtggatcacgaggtcaggagtttgagaccagcttggccaacatggtgaaaccccctctctagtaaaaacacaaaaattagccaggcgcagtggctcatgcctgtaatcccagctactcaggatgaggcaagagaattgcttgaacctgaaagatggaggttgtcatgagccgagatcaagccactgcactccagcatgggtgacagagtgagactctatctcaaaaaaaaaaaaagaaagagaaagtatttattcagtggatcatatttaccaaaataccatgagagtggagcctgaagatttacacaacctaaggagggaaaaaattgtaaacaagtgagtatcatgtaacgaaatgggacataatagaatacgtcagatgaacagaggaggacagcagatgtcccaagaacctcaggtgggaagcaggtaattctaggtcagaggtacatcaatttcattaacgaataagaagtgtaagataaaaaatgccctaaagagctgttcagtctatcttgactggtgatatctgttatctttgggaagttttttaaaagaaacatttaagatttctttttttgatagccaaaagtaaaacgtgtacatggtggaaaaagcacaatgcagaaaataaaaataaacaacaccctgaccccgaccccacccccactccaagatagaatcatttttgattgtttgttgggttggctgatttaattctttgctttgatgtgtatccttctgatgtttttgcatgacaatccatttaaatggtagatcatgcatgatttttcactgacctacaaggtgtttttgatcatcctagaaatgcagtttcctagaaattgattctgtttttgttgacgggtagcaccttccaatgtagtggctagcttatctgtttacagtaaaccttggccacacaatgtcaccagcagcatactccagagttggagctattttgaccttggccacacaatgtcaccagcagcatactccagaattggagctattttgtgctctgtaggctttgcattgctgctatattggcaattggttctgccataaaatatctgcttagttagaattcatctgctaggaaataacaccagtgtaacccagagcaattaaatactagaaactgccaatccatggaacacttgcctttccgtgaagcagggtgcatgccccgggcttgaagggcatcgggaccaagactggagcccgcctggctccttcttctgcctgttttcagctccaagggcaaccaggacaacaggttctttgttcctctttcttatttttacaggaacaaatgaaagcctctgccagcattcgctctgtatctggccttctcatctctagctggagagtcaaccagaggaagttcctgggcaaaacagctaccactttttcttacctcccgaaatggcagcgtctccctggaggcagacatgagcttttgttcccatttctgtgtcctcttctgctgggcctcagttgatagaacttaaaaattaccaaaggccctaaaggtttttcagaatagtcctactgtgacatgctcttacaaatcttttttgaggaagttggggctccaccctcaaaaagcagcagcccttcgccatggaggaataaaatctgtaaccccaaatatgctagtgattctttttccttttagagtttaatgggacaaaaaaaggccttgaggaattaagtatgaacttgcttgctctagggaaactccctaagtcggaaaactggacctaggaccagttttatcaatttctagcattttgatctcaaataaggagataaactggatggcctctgatagcccttaaaacttggctaaatatgcaggggtccttctaagacaatccatttccccatgcctctctgcccaccactcttcccatgctgggtggtgggtaaaaggtttcttctgctcacctggcaatttccatgctgtcaactgtgttagccaggccagggtcctgccgtgtccagaataatggattggggtttcccttcttctccagactaatagaatattacagagacatgtttaattccatttcaatatcctttttttttttttttttttttttttttacctataactagactcaagttctgaacttcaaaattctaaagaaatatttttatgtctgaaggtgttaagaaatcattggatatcaacttctatgtatttttgaagttgaagtttttctgggaattttttgtttgctctgtgtgtgtgtatgtctttaacacaaattggaatttgtcctgtgccaaagatttttagttgatagatatcttcagtatgggccattattttctgtctctctacataaggggcctctggtactaatattcttccacaagttgttgatcccagacccaccacctctcttctcccaaccccgctaagtcctggcttcatctcccacctatccaggcatcttggctgcagcttggcatttgaggtgtatatttgtgttccttttgatacatggtcaaggatctactgccccaagatcaggaccatggtgggcacaagactcttgacttctgtctcatccttgattcataagatgacccctgcattggcctcttgtagctagaagcctgggccctccggcaatgccacatcccagggtgtatctttcttgccattgcagctggttaagacaacagcctggaaaaagattttagtctggcatgcagctgaagggaagctcctggagaagcatgatatacatggaaattttaacacaaaaatatcaagagaagtggcttttttttttctttttccatctgaaagttgaggatggcaataccagagtccaggttgagcctagacactaatggtagatggagaactctcctgcttccaggacctgctggaagctggcctgtagaagctttggggttttgctttctcccaggtcacatgaaatgctgccaaaacaagctccagagttgtgttaataccacaggatttgtcagtcctagaatggaaacacattgccttgctttctttttgtgactatccaaaaattagaagacggtaagaagtcatcctgaaaactcccatggagcggaaccattactcatagtttcaaagacagtccaggcacttagaatcagaagttcttttcaggttctgtttatttgttttgctaacagattccttttttcagcaagaatccatttttagacacagggaaactgagattaaacagtgcatggtaatgggtgcaggcctcacagtgatgaaggggcagtgctgaggctctgattcaagtctgacttggagtcctctttccacctaaccgctgaagattaggaggctgagggagactagaatcagggttgattccattgaaactatgacatgccttaccaaaaatagcattgtgatttcagtgcactcacatgggcaggaggtgggtggctttgattccggataaattgatgactgaatgtgaaagcccctgaagctgtgtgtggggttcccactggggtttcttcagacctcatgcactgcacctgcctttatccaagagcactttcctgccaggactgtctaccctctactttctcctgcactcagcaggccacttttgttggaatcctaaatctcattctccgtgctggaataaagcattctgtatttggagaccttggatggagcactggtctccaatgtctggtattggtgggcatagaattattgtaattctacactaaagctcatcactgacttttctttttatctttcttatcattttttttttcactatgtagactgcaggaacatcattgacttttacaaccaaagccactcaaagcccactccttgctagttgacttgagcttagaaggggtgtccatgggagaaattaatgagcaataaggaaggatttgtttttctggaaggattggagctgcctccttttcttgccccagagatggccaaaggccaggtggctcttggtagctgtggtgatttttgccgcccatttcctgataagcacagaaacaagaacgctttgtctcctgaggctggagctgagcagcggattctatttgttagggggcctcagaaagaaactgcccagtgcccctaagaatatttctccctgcccgctaagctcctcctcttccgtaaaccttgctgtctgcagatcacctcctcctcaggcccctggtcatgcctaaagcagaccttttattaattcctgcacagggctaggcctgaatatgggctggggatgaggccaggctagtaagggagagaagtctgaccagagtggaatggggtaggggccctggaggtgtggggacagtagggaaggaatgtgatgggccacagattacttgcagctgaaagagataagggatgaggatttgaacccagtttgacaggtaggtaggtaggagccagatatggcaggagacattccaagtagcttgaactcagtaatgaggaagctgagcaacagcatgtagatgtatctacaggatgatcttcccaggccggcgccggggttcacacctggaatcccagcaccactttgagaggccaaggtgggaggattgattgagaccaggagttcgagaccagcatggccaacatggcgaaaccccgtctctactaaaaatgcacatattagtctggcatggtggcgcttgcctagctgctcgggaggttgaggcacaagaattgtctgaacctgggagacagaggttgcagtaagccgagattgtgtcaccactgcactccagccctgggtgacagagcaagattctatctcaaaaaaaaaaaaaaaaaaaagggaaaagcaaattcagctgggtgcggtggctcacacctataatcccagcactttgggaggccgaggtgggtggatcacctgatgtcaggagttcgagaccagcctggccaacatagcaaaactctgtctctactaaaaatacaaaaattagctggacgtggtggcgcacgcctaaagtcccagctactcaggaggctgaggcgggagaattgctcgaacccaggaggtggaggttgcagtgagccgagatcgtaccactgcactccagcctgggtgtcagactgtcttaaaaaaaaaaaaaaaaagcaaattcagtatctttaccataattaggaaacacactgaatacatataaccattaaaataagtaatggccattaaaattaaaaccatgcctccatggattaccttgatgtatccatcactttttgggaaacattgtcagtttctaacaacattgagatattacaaaatatcaaaattgggctaggcatggtggcttgtgcctgtagccccagctactcaggaagctgaggctgaggcaggaggatcacttaaggccaggagtttgagaccagcctgggaaacacagcaagaccccatctctaaaaaagtattttttaaaattaaaaatttaaatatcaaaattaacctacacttttccaccattagagctttattttgtttttgagttttccacttagtagcaaaactacagttctttatgtttgggagacaaacaaggtaatgaatcttaaaccataatttagtcagagtcaaaagtaatatggaacctgagttctgcttttgttgttgtttttgtttattgataagaacttatcacatgataattagcccattgtcttcattctgtaaccacttattaaacacttaccatgtaaacaatgagaaactttgttttcataaaagtctaggagattcccggaaaccttcagggaacgagccctcaggcttcaagaaaagccaggatttttcgtaaagactgttttcagggagtgcctggccagaaaggtgagacttgcaaggagagacatgggcggagcctgccgctcactccttcaaatcccaggtctggggcagtccttgtagattccaccaggattggcctgggaaagccggcaaagcaagcaggtgttgctcttccaagaggagagttctccataccttgtggagcctgacatgggagagaaagtcctgtctagggccagggtttggggaactgagatacaagccgaaagccaagctgcttttgagaaactgtgataatccttcctccaactaactgctgacccagtcatcccagtgtctccagatgactcatgtaagtagaagcaaacagggtaccttgataaaacacaagggtagaccacagatggttccagctccaaggcagatgtgatactgacagtgctgagacacagctgctcgcacagacacacggaagggagccagagaactatggaacttcccctaggaaagcatcatttgacttacgggccacaaccaccttatttatctccataggggacttgccattcattctatgaggggttttcagatattgttaattaactaaaccaatcccatcctagctgaattatgatctaacagtctgctatagactggaaaaaaatatatacatatacatatttttttggagacgcagtatccatctgtctcccaggctggagtgcagtggcgtgatctcggcttactgcaacctccgcctcccaggttcaagccattctcatgcctcagcctcccgagtagctgggactacaggagcgcgccaccacacccagttaatttttgtacttttagtaaagacagggtttcaccatgttggccaggctggtggaaaaatcatagtacattttaaatatttgtttgaaatcacttttgttcttaaaaaaaatcaggcacatcttaccatagatgatattaaattgtccatttaaaaactccagtttctcgggaacactccccaaggcaacttggaagtatgccccagacaaaagtgattgtcttgaatgattttaattttaattttatttatttatttattgagacaaggtctcactctgttgcccaggctcgaatgtagtggcatgatcacagctcactgcagcctcaacctcctaggctcaagcaatccacctccttctgcctccgaaaatgctgggattataggtacaggccactgcaccaggccgtaattttactttaaaaaaaaaaaaatctaggctgtacaccgtggctcacgcctgtaatcccagcactttgggaggccaaggcgggggattgcctgagttcaggagttccagaccagcctggacaacgtggtgaaacctcgtctctactaaaaaaaatacaaacattagctgggcatggtggtgtgtgcctgtaatcccagctacttaggaagctgaggcaggagaatcgcttgagcctgggaggcagaggttgcagtgagccaagactgcaccattgcacttcagcctgggtgacagagccagactccgtctcaaaataaataaataaaaatctaattgctcggcttagtgaaggtgtggttttacacacatagaggaggtttagggggctttttgttttacttgtttatcctcatgtcctgccactgagggcagagccacacagggcacagcacacctgctgccacccacagcctaatggatgtgcaccatccttggttgacagagtaagaatttgtcattttgccttgaactttatttttgctatttaacagccaaactaggtttcttatatctagaaagttgttcactttatttactcagtcagtaagttttgtcacagaaatggcctcgcatcacatttctgtgtatttttgccttattgtctctcatttgcaaggtcaaagtgtacatttcagatgtatggttggggatgcagctcgcgggagcgggtgatgtagggggaggtgcaagggaggcttcatagcatgctttgtctagaccctggtcactaggactggtcattaggggctgcgctggtagactgtaatgtcttctggaattctgaattaggacaagaaaaggcatgcatcgtttggaagttctgctctgtgtcgatggtttctctgaggtgaatctgattctggcaatgttagtaaaactaacccttgtctgcctggttgtcctactcagaaagagctttctgcaatcacttactctcccacctgctcaggcgactaatgttgggccatgggaaggaaggaaatccagcccagtggaaaggcttctctcatcccatactccaaagaaccttaacctggttgtcacgagagcaggacaggtgctggagagccctgcccttccaaagtggatggaatatccacccatctgcttcaaagccatgaggcccaggtttggttgtaattggaatgggtggaggctgtgacttttgggtgagtgtttgttctctgcccctagaggcaccttatactttgcgggccattctatggtttgcccattgtattcacatgtgggtctcactgtatctgtacctaagttttatctccccatgatagcagccctagacacctagacatagtgggaatggctgcacaaataaatgagttttatagttataaaaactcagtgagatggtagatattattacttctcctccaacctattattttgagaaatttcaaacattatggaaaagttgcaaagatagcactgttcagttaattcactaagtgctgaaattttgctacattttctttatctccctattttttttctttttagggggagctcatcatttgacactttctttctttctttcttttgacactttcaaacatgtttatactttgcccttaaatttttcagtatgcatgtcctaagaataaaagcatttttcctttgtaagcataataaaattatcacacttaaggaaattctccattttattttattttatttttgagacagggtcttgctctgtcacccaggctggagtgcaatggtgcagtctggctcactgcaacctccacttctcgggttcaaacagttctcctgccttagcctcctgagcagctgtggctagaactgtaggcacaccccactgtgcctggctaacctttttttttttttttctttttttgggacagagtctaactctgtcacccccgctgaagtgcagtggtgccatctcagctcactgcaacctccacctcccaagctcaagcaatcctcccgcctcagactcttgagtagctgggaccagaggaacgctccatcatgcctggctaattcttttctgtatattttgtagagactgggttttgccatgttgcccgggctggcctcaaactcctgaggtcaagcgatccatacaccttgccctcccaaagtgctgggattacaggtgaaattgtcctttatagatctttttatactgatgccatatatgagttccaggctatgcactccatgtagttaccacatctctttattcacctcgaacctgtattaatcctacagcctgttaaaattcataacattgacatttttgaagttttggccattggttttgctgtcactgaaatttggatttttctgattgttttctcctgtatacattcaggtgagtcatatttgggagcaggaaagacacctaggtgacatggtaccttctcagagcctcacactgggggcacttgatgtcagggcagctcatttttggaggagttaacacagatcacttggttaaggtgacatctaccagtttcctccattgccagggtaccttttcattttcacaagtcattaagtgatctgtgaggtgatattttaagactatgactatcctatttcctaagtcttttgccttctgattttagcatccactcaatttttgcttgcattgattactacctggtggtgaaggtattgttatttactattttcagatcaaaagggcgaggctcagaaagggacctgagcaaggtctcacatgcccagctgagctaggagaggaacctcatgcttcctgccctgagcttggctctgtggccattccactatgaccatgtttttattggaatctcctggattgtatcacagtgttttaccttttatgaacctctgttcactgccttccctcctgtttgcatgcagacacctttcttagaaatcgctagtttctatgaatctcatcaagttctgtcataggttgagttccctggaaggagagcctgatttggggcttcttgtgcaagtgattcagaagcagcctgccaaggagtgagggatccaggatgggaaagggaggaggcaaggcaaagacgtgggctctgcctggtcccacagggagctcagcagcgtgaatagccccccagagttgtctcaactcaaggctagaaggccactcttctccatctcacatatgtagaaagtacatatcagtatgtcactggcagtgagtctgctctcagggagaggatgtagcttcctgggcatttccaggagaagaggggcagctgtgagctttccacagccaacactcgcagcagatggggcatgggtgcctgccctagaggaggggctctaggtggagcaccagtagcatcccctacatgttcaatgttctcacattagttttttcctgaaggttgttcctgataaaagccaatttgtcctgtaataatatgctataaacctcaagtggctggctgaatcaaggtgtcagcttagtcatttgcaaaggcaagggataattatggttgctgttttataaggccccatgaatcttattcaccatcttcctgtctgggccctgctttttaggctgaggtcacttgtcagaacaaaggcttttcagctccttgaaaccacagaggagtcacaggatgcgcccttctagggaaggaagatatgtcaacgtgtttactttcagcacacatgagcatcacgattgtcatgttagacactgtccaatttggtcttggcaaaatatggccaacctgagatggcagtgataaaatatttatttagtcgccaagaattcttttagtggcatggtacccatcccgcgcccgcagcccctagcaaaacaaaaccaaacccctaattgatctgagttaatatgcatgttttacacttggatctcaggcaaatgttccttacagtgttgtcctcagattggtcactgagagcttgttagaaatgcaatgtctctggctcaccccacacctgcagaagctgtgagtctgaaaccaggaatctgtggcttaacaaaccccaggtgactttcacgcaggctctcaagtttgacaaatactgatccaaagtagtggttgtaaacttggttgcacgttgggatcccctggggaatttttttttctttttttggagacggagtcttgctctgttgcccaggctacagtacagtggaaggatctcggctcactgcaacctccacctcccatgttcaaggctgcctcagcctcctgagtagctgggactacaggtgtgtgccaccatgcccagctaattatggtatttttagcagagacagggtttcaccatgttgaccaggctggtcttgaactcctgacttccagtgatccaaccgcctcagcatcccaaagtgtgctgggattacaggcgtgagccactgcacctggcttttcttttcttttcttttctttttgagacagggtcttgctctgttgcccagcctggagtgcagtggcacgatctccactcactgcaacctccgcctccccaagttcaagcaattctcccgccctagcctcctgagtagctgggactacaggcacccaccaccactcctagctactttttgtattttagtagagacagggattcaccatgttggccaggctgatcttgaactcctggtctcagatgatctgcctcccaaagtgctgggattacaggctttagccaccatgcctggcttttttaggtgatttttatcagcagccagggttgagaatcacttgtctaaagctggctcttttaccttctatgaaaggaattttaacaccagcttcactttgaagagtatgtttttttaactgcaaatattcacttcccaatacctgcaggccctggaatggcatttgcagaaggagaaactattctttttggcacagagtctcctacctggaaatttgtagcagaagttgagcaaagctttcacatatttgagaagaaataaaaagataaatcttgaatgaatgagtgagattccttaggcctgcagaaagtcacgaaggtgatggagagaagttaggacgggggtctctggccagtccacatgccaacactgggtattattattgagtctgcacacccaaaaatgatcggcataggttggcttcttctaaattcagtcccacctcttaggagtagagttgtccatgtggaaatatcacacttccttcctttaatttcctttttataactcatcatacattcagtttcattatccatccttctcagtgctaaatacattatctagttcacacagttgagttcctttgggtttagaggattgaagaccatatgtacccgaatctaaacctgcttgtttggacatgaatggtcaggtctggtgtcccttggctgccccaggatagggcttgatgacctgctccttgagagccaggttaagtgtcagttctgagtttggtaaagggtgagagaacccagagcgaagctgccttggatggaaatgtcagccccctctctctgaccaggggcttgaccttgagcaagatcctgacctgagctaagactcctggtcctctctgtaaaaccgggatcatggtgcctgtggtccagggctgccaagaggagtaaatgagagaatgtaggtaaagggcttggcacacaacagccgctacatggatacaaactgccctgtgcccctcacccctgtgtccctcacccctgtgcccctcacccctgtgtccctgacctgacttggtacccacaacattggataaataccagagcatgtgtaatttctagttctgctgtttcaaggctgttatcactcaggacagctcagtaacttcttaggcctcggtcttctcattggtaaaatgggaattaaacactcactgacagaaccagtattggcaccaaaaggatgtcaatatggtttggtcattaagacgtaattcacataccataaaattcacccttttaatgtgcatgattcgcgggttttagtaccttcacacattgtgcaattatcaccactctctaataccagaacatttccatcaccctggaaagaaacctggtacctgtttgcaatcgctccccattctcttttctctcccccattctctggagcccactgatctactttgtgtctctgtagatttgcttgttctggatatttcatgtaaatcgagtcattcagtatgtggccttatgtctggcttctgtcactgaacaagatgctttccaagtatatccatgttgcagcatgcgtcagtgccccattcctttttatggctgaataatattccattgtaagaatagattactcttttttttttctttttttgagacagggcctcactcctgttgtccaggctggagtgcagtggtgggatcatggcttactgcagccttaaactcccaggctagagccatcctcccacctcagcctcctgagtagctgggactacaggtgcgcatgaccacacctggctaatttttgcatttttagtagaaatggaatttcgtcaggttccacgggctggcttcaaactcctgggttcaagtgatctgcctgcctcaacctcccaaagtgctgggattataggcgtgagccaccacacttggccacattttgttcatccactcatcagctgacagacatttgggttgtttccgcttgttagctattatgagtaatgtcgacatgattttacgaatagcacagcatcactcctctgtgaggttttattataaataatgtcagtaataaaaatgcttagatttgtgagaagaaataaaatccaatcattcaggtacaaaataaatctgtgtgagtgcatttgcctttagactggggcatggttgtgcttatgagaaatgctactgagcattaggaactcacggttaccatccatgctatttcgcatttagggttctgtcctcaaagttagaaatgttttatattggccaggcagggtggcttatgcctgtaatcccagcactttggaatgccgaggtaggcggatcacctgaggtcaagagttcaagaccagcctggccaacatggcgacaccctatctctattaaaaatacaaaaatttagccgggcattgtggtgtgcgcctataatcccagctactcaggagactgaggcaggagaatcacttgaacccaggagacggaggttgcagtgagcccagatcgcgccactgcactccagcctgggcaacagaataagactccatctcaaaaaaaaaaaaaaaaaaaagaaaagaaaaagaaaaaaagaaatgttttatgtcggaagacaaagcctgaataaatggcatttaggatgcttagaacttttgaaaatggggttaggaatagaaggtcaggtctgcccagtgcaaagtgttctttttaatattagagatagagggtaaaataaaacattgtgtctgccctcagaaagctttcagtctggaagagaagatgattaagggggcgatcacaagatggggtatgtgcggtggcaagcctggcctatgaacttgtagggacggtctccttgttagggaaatggtactgcagccagctgaccgtgccgcttctctttctcctagcatggtaagacacaaggatggtggctattccgaggaagaggacgtgaagacctgtgcccgggactcaggctatgacagcctctccaacaggctcagcatcttggaccggctcctccacacccaccccatatggctgcagctgagtctgagtgaggaggaggcagcagaggtcctgcaggcccagcctccgggggtaagactcagaacctcgggaagcaggttgaagcaggcaggactgctgccggcttaaagaaaaacacttggagttagttccagaaatttcttcctagcttgtaaggagcatgtctcttgatgtgtaactggttttcaatgcagaaatattctgtaaacccaggaacagagcccttcacgatgtgtctttctgtctttatctgctcagttaccatgggaggtacaaggatccagcagagaactgagcatctgggtagcgagtaggggccactggccagaagcctgggtctgacctcttgagcctggacactgaggatgagcctgggtctgagatccttggtggcctctgctaccttcctctccttctgagcctgggagccctgccaaggtccagccatccaacttgggacccagccttcaaaagttctgtgtccacagacttgcctgctctgtagtcctcttttccctgggctttccacacagactaaagtctaatatggtttcctcagctactgtctatccaagaccactgtccgtcccatccagaccactccacgacttgtggaaggtcctcaaaaaagtgactggagccgggcacggtggctcacgcctgtaatcccagcactttgggaggccaagacggacagatcacttgaggccaggatttctagaccagcctgggcaacacagtggcaccctatctctactaaaattacaaaaattagcccggtgtggtggcacacgcctgtaatcccagctactcaggaggctgaggcaggagaatcacttgaacacaggaagtggaggttgccatgagcagagattgtgccactgcactccagtctgggcgacagagcaagaatctgtcccccccaaaaaaaaaaagtgattggtatctctagtgctatccaatatggtagcttcttgccccatgtggctgtttaaatttacatgaattaaagcaaataaaattagaaattcagctcctcagttaccgtagccacattttaagtgctctctggcctcggctggctgccatattagatggtgcaaaatttggaacattgtcattgtagtacaaagttatagtggacggcatttgtgtacagtgtctacttccaaaggataaatacaataagtcacagataaaataatacttaacacgcaacacaagatagaaactaagaactagatggagaagcaaggagaaaatcccattagtagctagctgaggaatgtcataagaattgggcactaaatacctttttgagtttcctagcagtcagagtctgtctgttctcactttttaaaaaacatatgaatctttctttattcctcatcaggcagaaacaggtagaactaagacgtctgctagaacatgctcaggggaacaaggcacggtgctttctcatctttgcagagaatcccttggccataacacagagctgctgcctctagttttgttctataggatcaggatttcctcaccttctgtgaagcctaactttcagccagttgaattgtctgctcttgcatttctgcaaaacattccaaagacagaagttgctgcagagctaggcaacagcctgcccagctccccctcccaaggtagggcacgtccactcttgctgaaacctgcatgggaaacaagccaggcatgttctctccatccacctgcctgatccctgcacagggcctgcctgatgagattgggcaggttgagggcagggccaggacaggagtaacgtggaccaggacagtcaagaataacgaagggagaggccaggcatggtggctcaggcctgtaatcccagcactttgggaggccaaggcgagcagatcacttgagatcaggagttcgagaccagcctggccaacatggcgaaaccccgtctctactaaaaatacacaagttagccagccatggtggcacgcacccataaccccagctactccagaggctgaggcaggagaattgcttgaacccaggaggtggaggttgcagtgagctgagattgcaccactgcactccagcctgaatgacagaccaagactccatctaaaaataaaataattaaataaaataaagaagagagagaaaagcaggtggctaaaagtgtgtgaaaaaggaggatttgagagactggccatggtggcatgagtgaagtgggctcttggggtgcccatccttaattattctacaatctaagatagaggtccacagactgtttctgtaaagggcaaagtaaactatttttggctttgcaggccatagagtctctgtcacaactactcaactacactattgtcatgcaaaagcagccatagacaatatgtaaatgatcgagcgtggctgtatttcactacaactttactcagaaacagatggcaggatggatttcgtctgcaggccagactttgccaacccctgatataacgtaaggctgcagtcctccaaaaaataaggcctagaggttgcactccccaaccccaaggctcagggagatctccacttggaaaagggagtgttacttcctctcctaacaaccaacagctgcctctccacagtgctttggcctcttacccccctggatgctatttaggaagcatctgcttcagttttagggtgtcccagaggcactgactcccagaacctgctactggatgagtcctatggatgcatccccatggtgccaggagaaaagagaactcacggtcttccagcttcattcttcaccagatacccaagtcccatacccatcttcccaccccccaaataaagtatcttatgagatatcaactggagataaagagaggagcaaagattaggcagggaaaaaatgaaaggctatagaaaggtaggggagagaataggtagagagtaaggtgtttaaatgcagaggaaagagaagtagctaaagaagcatgacagacagaataggagaagggccatgctccacagaagggaaccaggactcagctgggctgccacacgccatactccagggagagtcacttcatttgtaggctaggtgaatggtgcctcctggagttgtgcagtgcacggcctacacaacagtacacagcatacttaactctgcagtgatgagggacagaatggtgtcctgagatcagcactaggaattgaactgttttaaagcatgtgtctaaagacaatattaggatcttgagggaactggtagaatgtgaagtgagtcaggaataaatggacagcctccatgtccaccggggtgaacttcagagtgcatccacccaccacccaaatggaacagccatttttcagctccagtagattgttgcctggtcttgctatatcatctcattttccaagaggagctagaaattcagatttcaatttgaaaacaaaaaacaaagcaacttctgctttttcactgttggccacaaacttaaatttctattgtaaatatcctcataagccaagttaaccaatgaaatgccaattcctatggtttagtcatgttacctgtgtttagaatttaggtttcaccaaccaagatatataagacaggggctacagaatataactcatataagacaggggctggagaccgtaactccagcagtaaaacagtcactgaactgaaaatgcttatgcagactaggggagttcttagccccatggagaagcttctgtcagagggaaagcaggattcttttggaggcagtaatgaacaaaggtgtctgcagcctgtgctctgagcacccctttctatggcaggagagtttcctgcagggagccatgcagtgtggatatgaagggattctattcattgagtgtgagggaaaccagatgcttgggttccaacattctagatatttcctaaagcttgtatttcttttccctccactagatcttcctggttcataaatctaccaagatgcagaagaaagtcctctccctccgcctgccctgtgaatttggggccccactcaaggaatttgccataaaggaaagcacatacagtaagtggtcattggatgctcaggtcctgactgacagggccacggggctctgcagggagtggaaatggaaggagctctggttatgagatgggcagatatgggcctgagtcttggcactgaatgactaggcagataacctactccaggagcctcagttttctcatctgtgtaatgggatgatggtaacctctgagatgttaatgagtcaaacaacctgaatataaagtgtgcagcctactgcatggcatatggtagggaactaatagaggttgacttcctctccccctacccagttaagtggaacatgaattcagttcccaggtttgccagtgactaagttgcaaggagactgtagcgagagagccctttcacgctaatcctaaatcctaaagcatgtgtctgcacttcttcgtgaataaataatccctgagcagacctgttccctccaggcaatcagtgttcagtcttctatgaaatgcagctaatcagaggcagaatccaaccttttgatgaacattttgaagggagagtggtgttcagaagtgttggttttctttctgctgttccacgattggtcattggaaatgtgaagtgtcgggaggccaaattttaaataaaaaagggaacacccagttctgatgtactgccagcctccaagaaaggatcggaagatggatctgcacatcaaagggggaggagtgggaggagcaggccaggaggagagagctcagaagcaagacagagcctgggattcccacttgcttcccgatttcccagcacctcacctcctgcatttggagaagctgaaggtgtagatgaaggtcaatttcagggccgagatgagattctactcagccgggagggcacaatcttgctgagccaaatgaccattaactgagttaggggagggtaaaacctgccaggctgactgtgaaccgcctccagctcaattgtcaacctggatcttacaagtccacaaggtcatggatgccagggaaaaacttccccctgaaaggcgcacaagcaggcggaacccagccaataatgtaaatacattaggatgcaaccagaaggtacattgcaaacccactgcttgaaaggtaataaattcatattgagctaataatgtgttaggtgaattgataatgaatttatattaagtgaatcaattaagtaattctgaattggcttttgaaagtctgcgagaggctgggcaccatggctcacacctgtaatcctagcactttgggaggccaaggccagagggttgcttgagctcaggaatttgagaccagcctgggcaacatggcaaaactccatctccaccaaaaaaaaaaaaaaaaattagccaggcatgatgacacacgcctgtagtcccagctactaaggaggctgaggtgggatcacttaagtgcagtgagccgtgatcgtgccactgcactccagcctgggcgacagagccagaccgtgtcttaaaaatgaaaaaacaacccaaaaatattaaaaaaaaaaaaagtccacaaggcaagaagccacagatctaactggttttcaaattcctccctaatgtccaaagtggagcacgatggatgtgttggtcggaagccacttcctctcctcttccagaagtgtgggcaatgtgtgtggaagcttcctcgttgttcattgaggtccttgtggccgaaggtttttcccccataatttgacaaggcctctaatcacttccctaatcttctccaggtgacttcaagtggttaaaagagcttgtttaaataaagcattagcctggtcataactagttaccacaggcctgggtcccactgcaatggccccttctcagccagggcctgtttatcttctctgtgaattgaggtgaaggaaggacttgctataaaaacattcagggaggctgaggtgggcggatcacttgaggctaggggttcgagaccagcctgggcaacatggtgaaaccccgtctctactgaaaacacaaaaattagccaggtgtggtggcgcaagcctgtaatcccatctgctcaggaggttgaggcaggagaatcgcttgaacccgggaggtggaggttgcagtgatccgagatagtgccgttgcactctccagcctgggcgacagagtgagactttatctcaaataaataaatattcagatattttgtcataacttacagacagtgcagcttaataataaacaacacctcatatttggaaacaatgctttcacataaattatttcatttttaaaaaatttcatctccccccaccacccttctgggagataaggaaagtactgttagggtccattttccagatgagaaaaccgaggcttagagaagctaacctgctccaaatcagttccctcctccttaactctacaaattgtggcacacgtgtgtttgttgtttctgtgtgtctgtgtgtgtctgtgatggtatatgtgtagcggtatggatgttttttgggggtgctacagaaataataaaataatacaaaaaagcgaagaagcagccggcgcagtggctcacacctgtaatcccagcactttgggaggctgaggtgggcggatcgcctgaggtcagcagttcgagaccagcctgacatggagaaaccccgtctctactaaaaatacaaaattagccaggcttggtggtacatgcctgtaatcccagctacttgggaggcttagacaggagaatcgcttgaacccgggagatggaggttgcagtgagctgagattgcaccattgcactccaacctgggcaacaacagcgaaactctgtctccaaaaaaaaaaaaaaaggcaaataagcaaaataaatgagggtatgagtgagaagaaacacatcggattgaggaaatcttcataaaacaggatatttcaaatgtttagaggaatatcagtgtgagttgctcagctgaggtggtgtgagggctggctggcaaattcatgagtatttgaagtcagactacttgctgctccagcatttggaagatgtgcagaatgccacaccatcttgccagtatgtgtcttttttttttttttttttttttttttgagacagagtctttctctgtcacccaggctagagtgcagtggctctatcttggctcactgcaacgtccacctcccaggttcaaatgattctcctccctcagcctcccaaatagctgggattacaggtgcatgtcaccacatccagctaatttttgtattttcagtagagacagggttttgccatgttggccaggctggtgtcaaactcctgacctcaggtaatccacccaccttggcctcacaaagtgctgggattacgggcgtgagccaccatggccggctcagaacatgtcttctgtgttagaaaatgtgaacactggagcaggggtggaggggggaacaacactccaagtaaatgggttttagaatctttgttttaaaaaaaagtgagagagagagaaaaaaaaaaagagagatgtagtctcgctataatgcccagactggtctcaaactcctgggctcaagagatctccctcctcggcctcccaaagtgctgggattacatgcatgaggcaccatgcccggccagttttggaatctttcatgttgaatttaaccaaaagctgatttcagggaacttgttatatcctcccagctctacattccttctcccgtgtgcttttatcacaggtgctctgttatggcaaaaaggagtggccagggaagtgtgtgtcctaggagggtcaagggatcgaggggagtaggggtcttggtgttccccaagccctgtcctgtgctgatacaatccagacagactggccccttgtcccctgccctttgtgttctgaagttaaaaaaaaagacagttgtgcaactcgagtctgtcctggtctgtttaccaagcactggagcatgtgctcggcatgagtcaagcgatgaacttccagatcatcgactgtttaccggtggctgctggctgacatgcctcctctgcacagctggttctgataagccacacggtagtttgtttgagagtactcagatggtcccacacacatggtgttaggggctcttcctgtcccagaacgtgctcagggagaatcagctggtttctgaaatctcttttccagccttttccctggaaggctcaggaatcagtttcgcagatttattccggctcattgctttctactgcatcagcaggtaaggcctcttcctctcatatggtttcaaggccctgtttggtgtgtgggatataattaacctgaggtttcttgaaggatctaggaggctggccacctatttgatgttggcagattaagactggttacttaagtaaaatgttcaccaagtgaacaggttcaccaagttcacaccatgccaggcttaaggtcaaaacgactatcccaacccctccaaacataaattatccttcatatgattatttcttcaagctgctcccaaggctcctttcagccaggcccatcaagcaggaaacacacacacacgcacatatgtgcacacatgcacacacagacacacatgcacacacatacatgcgcacacacacctacacacagaaagggaatgtgcatgcaaacctgtgactttgaaagcttcatgataatgcctctgaaaactctgtaagggatggagttcattctacaaatgtgggttccttaaaccagcccatcagtcttgtccttcaggccaactgggtgctcatgtccttttcataaccaaagcaactattttgttctatacaatgttaagtccaaaatcagttttttgttttttgttttctttttgagatgaagtctcactctgtcacccaggctggagagcagtggcgtgatcttggctcactacaacctctgcctcctgggatcaagcaattctcccgactcagcctcctgagtagctgagattacaggcgcctaccactatgcctggctaatttttgtatttttagtagagacgggttttcaccatgttgaccaggctggtcttgaactcctaacctcagatgattcacccacctcggcctcccaaagtgctgggatcacaggtgtgagccaccacgccccgcccagaatcagaatattaaccagagtcaacagggtgtgcattgtgaaaggctttctttctttctttttttccatttttttcttactagcaataacagttttttcacatcaagtgttttttcagtaattaagaatcaaaattcttgttatctgcagggattggcattgcctcctcttatggggctgagctcaatttggcttccttttcttctctgtccatggcagctgatatggcagagacaggaaaatgtgttactaggatgttttcagacatcacttctcacagctaacacacgtataggctggggagtttatttgagtttggctcggtttattttaatttaaggattaggttgtttctcaaagactaaatgcctgttgactagactctgccagagggcaggaggcactacgcacttttttttttttttgagatggagtttcacttttgttgcccaagctggggtgcaatggcgtgatctcggctcactgcaacctccacctccttgggttcaagcaattctcctgcctcagcctcctgagtagctgggattacaggcatgcaccaccatgcccagctaatttttgtatttttagtagagatggggttttaccacgttggccaggctggtctcaaactcctgacctcaggcaatccgcccgcctccgcctcccaaagtgctgggattacaggtgtgagcaccatgcccggccaggagccactaagccgttcaccctctgaagtctccaggtcagctgaagccacacaataaatggcctcaggaaggggaggcacttccagaggaggaattcagcgctgctcaccagcaggaagaaaatgagggcttcactgagaatgggactagtacctgggggcacctcccaagaggatgcaacctgcctgccatgatttgggcaggatctcttaagcctgtgtaaggaaatgaaatgtgctgcccaaagagaggaggctggtgcagaagcacagcccccaacagacacacacacacacacacacacatatatacacactcatccccagggaaccacacctggtatggcctaaagccaaccaggttggaggagtaagtctcaatgctaacacgttggccaggggtgaagccagctgatatttacttttcacagtttgctttttggtaattgtggagttgctgggaaaaatcattacacctacaaagcaatatttggcagtagcatagaaaagttaccatcagtgttcatggtagactggagtacctgctgtccaggactgtttgaagatgcaaggagataaagtatatgaaagccttataaactataacacatgataccaatatataaggtacttacaggaaaactccaaaattgatgttttgcaggtaggaaggccaagattaatttccctgtctgttccaaaatgcaaagatatttgatgtttttgtttctctttctatgctactcatctatgttcttggcaattggtagttgatttactcagtcttacaagaatatttgtgacattttttagttggttgttagtatataaatatattcaagtaaagaaagtgattggattattggttctggtgtttcacacagcatgcatatgcaaatatgcattgcacaagagaattcacgaatcaataaacataggatttgccatagtgggaaggctcgctgaaaagtgtcattgagaatacaaatagtgactgcacaccttcacccccaatgcctggcaacgctctgttgatttggtgttatcagtgtagtagtgagagtactagagtcatttggagtcttgctaaatgcagaatccggtacagtgggtctggggtggtacctgaggttttgcattttcagcaagctcccatgggttaaggctaatgctgcttgtcctcagaccggaatagaggaatagaggaaataataattttaggggtcttctatatctgtactaagcaccatacatacatatttctaatccttatggcaaccctataaattaggatgatgaaaacactgagacagaaaaagtgaagcatgtgcccacaatcattcaatcagtaaatgacagttacgggagttgaactcaggcctgccttaatgccaaagcccgtattttcccaccatactattcagctgctgagaccttagggtccaacacatccaggttttgaccctcacttcacctccattagctctgcgaaggtgtgctagggacctcacttgtctgtgtcgtcatctgctcctgatccacagaatgggggcatcacggcttcctcccagggctgttccaggccccacacgagttacggtgcctgctgtaatttaatagtagttgcccgatgatctttgtcccctcccctttagaaatctacgtatagagcaaagttaaacaaaataaatctagactgtacatgttttaactcttgggtgaaacatttatatctaagatgatggcttttgtttttctgttatgcaagctttagaattgaggcccctttctttaataggatgtaagtgagaaggcgtccctgtgtgagtgtgtgtgcgtgtgcatgcatgtgcatgtgtgtgtgcatgtgtgtgtgaagatgctgggatgcaccctggctggcacagtgggagacgatgcatatacaacatctaattttctagtagatcaaagcctgaaaccatccattaaccaaggacaggtgtggcttcctgtcatatatcattaagaaaaccccaaaccagtcatgtgacgtttaagctccaggtactgcattgagcaaggtaaaagcttaatataaacacaggttggttttgtggtatgcagctttcccccaaaattgtctgaggaaagtagattttaattaagttggtccggccacacaaacatatatttacagtctagtttggtgttacaaggttgtggttcccattaatcttcacttgagattagcatcagggttgccgccctgccaggtcaggcagcagctattacagacacagccatcccctgcagtgctgcctgcttcatctcaaacagacacaagtggccaagcaaagggggtgctcacaacatttgaggacaagtgaaaggtctcatggaaggaagaggtgatatgggcctgacccccaagaacagcagcctcctggctttacattagcagagtactacggtgtcaaaacattcttgcttttttcttcttttcattgacttactaatttgttattcattgttaacagcttccatggctccaaaattctccagtcatccagatttaatctggtttatccaagaatgttgcctaattttaccgtaaacaataggttgtttggtatcattattctcgtcagtggaaattctcagcacgtctcatgatgacaaagtccaggcaggactccaagttttgttccttactagcaccttccagccgcagtggtctccttgctgttcttcatccatgccagaccctccccaccccagggcctttgcacctgctgctcactctgcctggaaggtccttcccctcatgatttaacccctggccaccattagatcttcagtcaaatgctgcctgctcacgaagacttgtctgcccaccttcacactcaaacactctttattctcctttcctgcttcacttttatccatgtcatggatctccttctcatagattctgtaaattgtgtatttgtttattgtctatcggtatcccctgacatggagctccatgcaggcaggaacttccgtctgtttcgttcccagcccctgatgcaatgtctggcacattgcagatgatcataaacatctgtggaacaaatgaatgaataattatttctttgtaagactattaccaccactggaaaaaaacaaacaaacaaacaaaccctcctttttgattaagtcaccatatttattgaatattcattcattcattcaagtacttcctgcctgtctgtgtcaggacagtgttgtgctttgccctgtggggaattcaccagtgcttagagcatggtcctaacctttgtgaatgaacatgagcaaatgtttaagtctgcctttgccatttccaagaaagcaagtcatggcccatggctgtggcaggtccctgatgctggctgggctctctcctgttgggtctgttgctctctctgccatgtgtgtttgtccatctgcacgtggcaccatgctgcttgggtgctggggttattggcatgaggggtcttagacttgctttcctattcaaagcctggtccagggtccagcagcatcagcatcctctaagagcttggcagaaatgccgaatctccagtccctcccagacctctggaatcagagtgtgcagtataacaagaccctgggtatctatctgtacattagagaagctctgccttcaaacacaggagaacgttttgtctccagcacaccaaggccaatgtgtgggctgtaatgggaagatttcataagtaaagccaacagatattcattgagagcctgcagtgtgcaaggcaatgggctaattcatctcggtttaggattccacattcctgcccaggcagtttcggcccaacattcacataggcatgcagtgaattagtacataatgttttatatgcatgctagatctaccaacaagtcagcaattctgatgtaaactctacatacgttttagctactcagcagggcaattgggtccctactttgatactgaaactatgctggtttttctctcagcctgtcctgagtgtgtgataatacagacaggaattttaagtgttaagttttaccaccaggaaagataactttgtcgatatggtatggtgtctacttaggacattttaaacagtttaagctaaaacatctctatgatgaaaataaacacaagatagaaagcagacatgtaattacaaacattctctctttttctgaacaatcagggatgttctaccatttaccttgaagttgccttatgccatttcaacagccaagtcggaggctcagcttgaagaactggcccagatgggactaagtaagtgtgtgccccctgcctgagtctatctaaaaatgaatccatggagcagagtcaatggtgggctcactgaggctacattgctccgtcaatctctccagcttctccatcagtgagtttgggctatccaaaatgttgacgtcctcttgtaaacatctgtaacgtgttgatgtcttccctttctgaggcatcttcctggggagaggcagcacttgacagaaagagaaatccagtgtagtgcatctcgcgtgcatgattttttttttttgaggggcacacgggcattgacggcacttctgtgctttgaggaatttgacagcacagacatctagagtaacgtctgttccacttcctctcttgtcgttcaattgttgtcctgctgttctggtccatgtcctaaccctgccggggatccttggtctggcagctgggtacttgcttccccgtcctgtccctttgccgatgtcccctaagtccccacaattctgccggacaatggttgacaatggatcaagacatacaactcacccactttaacgtcttttccccattgccttgggggaatctgtgtgggtttagcttttgcaaaaaatgttcctcctagatcaaaagaggaaattctcttaagattttaggacttcactcactgtgatacttgacccagcaaataaaagatgtatgtattcctcctctggcatatttttctcttaatttaaagaacttgttttgaagcaagcgccatttccaaggaagcttcagcgaggagcctgggcatagctttgaattcccttctgctgaaactgcaattttttttttttttttttttttttgagagggagtctcgctctgtcacccaggctggagtgcagtgttgagatctcagctctctgcagcttctgcctcccaggttcaagcgatcctcccaccttagcctcccgagtagctggggtcacaggcacttgccaccacgcccagataatgtttgtattttcagtagcgacggcgtttcaccacgttggccaagctggtctcgaaatcctgacttttggtgatccacccgctttggtatcccaaagtgctgggattacaggcgtgcgccactgtgctcggccatgaaacttagattgtatctgtagaaggattgccttctgtgtttgaggcctgtctgatggcaagactgggtaatgggatttggaaagagaatactggtaaaactctcgggccatagaaacgtccctatttaaaagttgcaccttctcttgcaactaagttctgcatacctttggagagagattaaaatacttgctgaagttaagtcaatattgtcaactagattctaggcctcttgaagatgtgcaccgggtctcagttctctctcccgacctctgtccacatagctccagtctgatggtccacaggcttagtgagtgcatagtgctgagtctgaaggactaaagtgtcaaggacaatgcttgtgccatgccgagagaggtgaaaagagtttgctccagtggctactaaccagaagcgactgagggctaattaacatatattcgacttgtgattctcgatgtgcatattatccattttgcgtagagatagaatattttaaaattctgtgcctcagtaaaagtactgttcatcaaactaatattcctcgagggtctgctttgtggcagacactgtgccccagaccaaggactcaagggttaataagatcccctctcactccctgtgcctgtacctactgccaatgagatttgtagtttatatgggagatagatatacacgtgaactaaatatacaaagccttacaaaagatttacagctgtgacagtataagtctaaggaggactcaaaggaggtggaagtaatttctccaagacctgctgtcctgggtaatagaaacataaggctaatctgtgtgtaatttgaaactgtctagtagccacacaggttaaattgattttaataatttattttgttgtatttaatatatccaaaacattataatttctacatgcagccaatataaaaaattttaaggtatgaaatgttttacattctttttttcatatcatgtattcgaaacccaatgagttattttatacttacagcatatctcaaactcaggccctgaatgtttgtcagaaatacatggtttgtatttagatttcattaaattcacagttaaaaaggtagattctcataaccaagttccaaagatacttaaacgttttccagtaactgaactgaacatgagttctaaaatttaaattgattgacactgaatgagatttgatattgacttcctcggttgtactagccaacttcaagtgctcaatagccacctgtggctgttggctttcttgttggacagtgcgggagtcgggagagagaaggagggatacaggatagattacataaggcaggtgacacggctgtcaccacacagacaagggagagccaggactcccaaagggcttcatctcagtcctcccatggccagccattctgggcccatgggaaagaaagacactgcaaagcatagctagagatagagaataacccattccaggccaggcacagtggctcactcctgtaatcccagcactttgggaggccaaggcaggtggatcacctgagttcaggagttggagaccagcctggtaaacatggtgaaaccccgtctctcctaaaaataccaaaattagccaggcgtggtggtgtgcgcctgtagtcccagctactcgggaggctgaggaaggagaatcacttgaacctgggaggtggtggttgcagtgagccaagatcgtgccactgcactccagcctgggcgacagagcaagactccgtctcaagggaaaaaaaaaaaagaataacctatcccaaatggaaattataacaggcaccactgatcacagcactacctccctcaacttacatggaacactgagactcatctgcaagaggagacacaggcagtacagatcaataagcaatctgcactacttcgcagagcattgcatatttatgagcatggtgaggaggttatataggatttgggaaggagggactccaaaccacaaaggtaaatggttgggcctgcactgcacattaagcttgctgtggtttttctgctgatgggacccatgaatgtagttttcctcctttggtggttttaatgctgaatgtgtaaaaccctaggcagattgtgtaacatcccccaggcccagctgctggtcctgcccattaaaggggaacttcaaggcccgattccttggctggcagctgcactgtggagggcatcccaggagaagttgttgggaaagggtggtgttgctttgtaagtcggttcagtttttgtaaagcaagtcaggaagccccagtgaccttttttgagcttatactggagcaattccagttcctttttttcttccaacttacctgtgaaaaggcagggctggaatcctatgttggccaagccatttctccagggctttgaaggtgacagacccctggagccttcctgtgagcccacagctgggcctggcagcctttctgccctttccagtaaaggaatgcagtaaacctgagtacaacgcaccccctaccccaccccgcaagactcgcgttgtcatgcagtgtgctttttttaatttgtgaaggaatggtctgagtgtaccgtatttacattcttgtgttcactgataatgactttcagatttctggagctccccagctgacagcaaacccccgaaccttccacctccccataggcctctttcctccgacggtgtctgtcctgcctccctgcgtcagctctgccttataaatggagtgcattctatcaaaaccaggacgccttcagagctggagtgcagccagaccaacggggccctgtgctttattaatccccttttcttgaaagtgcacagccaggacctcagtggaggcctgaaacggccgagcacaaggactcccaacgcgaatggcacggagcggactcggtcccccccacccaggcccccgccacccgctattaatagtctccacacaagccctcggctggccaggactgaaacccagacgagcatgccagaaacagtcaaccataacaaacatgggaacgtagctctgcctggaacgaaaccaactcccatccctccaccccggctgaagaagcaggcttcttttctggaagcagagggcggtgcaaagaccttgagcggcggccggccgggcgcaggcccggagctggagctgggcacagctggcagcccaggtggggccccgcctgaggccgccccgggggattgcacaagggccccgccgcccagctctgaatcacggcccccgtgccatggaggccggcagcggctgagcgacatgagcatttctacttcctcctccgactcgctggagttcgaccggagcatgcctctgtttggctacgaggcggacaccaacagcagcctggaggactacgagggggaaagtgaccaagagaccatggcgccccccatcaagtccaaaaagaaaaggagcagctccttcgtgctgcccaagctcgtcaagtcccagctgcagaaggtgagcggggtgttcagctccttcatgaccccggagaagcggatggtccgcaggatcgccgagctttcccgggacaaatgcacctacttcgggtgcttagtgcaggactacgtgagcttcctgcaggagaacaaggagtgccacgtgtccagcaccgacatgctgcagaccatccggcagttcatgacccaggtcaagaactatttgtctcagagctcggagctggacccccccatcgagtcgctgatccctgaagaccaaataggtaagtaccctcttttttaaaatataaaatctattgtaactctgtccgggcagtgcaacctatgtttgttattttttatgaagtttactccgaagttcaaaacaacacccagctccaccttctctcccggtttgaatggaaaaatcagtttctcaaagtagctgctgactgccagactcaaaaatgtcttcgggagtgacagattggagctgcacagtgattctgttcagggatggagtttggtcctctgtgggtccagctgccgcctgctgtggtaacgtgtgtgtgttacatgtgccgggtgtttctggacgcgtgcttctctgcaggctgtgcatacatacaaaggtagttttgttatcttctgagaggcagtgggtattttgttctgtcttggttgcaagtaaactttttattgaggtgtagcatatgttcagagagcacaaaactcacgtatgcattggaatgagtttccaccgcaagcttacctgtgggacaactaccaacccctggataagcagaacctgaccagcatctagggaccccgggccccctgttctccctcaaggttaccatcctgctggctcctcatcccatacacttctgtaagcagcacggcttgggagtaagcaaaaactgaaaaagacaagtttgttttgtgtaactttaaaataagtaacatagtttggaggtcacatgaaaggtgttttctccaacttcaaggggaaattctttctttataatctcatttaaaggatgagttgctaatggttactttggccaaggcaaatttgaatttggcaagcagtcttttcttccagggtgagaatgttgaaggttctttgtttgtttgtttgttgtttttaattttagaaggttgactcttgaaggttaatttcagagactttattcaccaggcagcaggagcctttggagctaccaaacatttccaggcggttcagaagctacaccccaattttttctttctgattgggtccatttgttgaaagtagtaaacagtgtgtgatagagggctctttctctttctctgtctctctctctctctcctctcttttttctcgtttaagtgattttcagcagctctttgattttctcacaaaggaatcaaagccttgtttgttttcttgtggtttgactgaggccaggcctggttgatcagggcgtggttaaagctggggtgttgctggagtgagtggctaaaggaatgtgcccttgtgaggtgccttctaattgaaaaagacatcaaggagacagcagaatatccacacaggctgcctttttccccatcccaccagagacccgctctcaagggagaccatatctgactcagtattaacagaaacccaacctgcaggagaagcttcctcttaggggctggggtcagaggggggtgcagccaggcaggggctgatgtcaggcctgagctatgtggccagcggcgccaaccagcccacagtgcctggccttccctccctgctgatgctgtaagaaccaacccaagttagtcccgggaagctcttcagccagctccttttgtagttaaattcggatgtggtacttgctcttagaactcaaggactcactcattttctccaaaaaacatgctaaaattatgtatttcactactctagaaggatgcagcctttaatttaaaatgatttatggagcttcgagtataagcccggcagcctgtccaagctattccagtgggtcctcacctcacccctgtgaacaggcatcgtcatcccttaaggattggaggaaggcaaggagggctctgccaggccatgccatttgtctgacagccacactctctagtaaactagcaggtgcggtatttgaacttccattggatcagaagcccacgtttgctgagctcactgttctgctgctgctgcttgtgtttctattttctcatcagtagttcaggggaattgtaactgcagggacaaccctgtgttgaggcagctcagactaaagctctctgttgagttatggatatggcctccacaagcattgccatgctttttctgtgggtttgtttggtttggtttttttaaacttttgcactaaaagcagtcagttcctcctgtttcttcaccagtgaaacagcattctgttttgaaagtatagtgacagtgctaggcttttgaaataaagaaggtgagtgggagcagaggtcaacctgagaaactcatcacaagtccaggtggaaggaaagatgcgaccctaactattagaaagccagtccccatagaggtgcactttattagattaggcctctgaccagaacatggacttagccagcccacttgtctatgtgggcttaaaaactggtctatgtctgctttaaaaaaaaaaatctagttctatcctcatttcctatagcttctgaagaagatagctctgaactagaagacagaattctaatttaaagcctagatttatggaacaacttgaagtcaagaaggtaggaggagataatacactggtttaatccatgtatgttagagcagtcattcttaggtgaaaatgaccctgtgaatgcatgcacatgtatccctttagtatatggagatactactcatctgtcttcttcagagggtggttcttcagttacatagagaaaagctaatgagaaaaacaaatagttctcagtcactttccttttgcccatgtgctggtgtcactatcctttctagcactttctagacaagtgcaaatgataaacagtgaatcaatctcaaaaccgaaaaactgcccctgtaaatgattatgttctctcatggagaatttgcattctatttagactaccctttggagcacttccaaccaaaagccctgctatgcagaggttcctgaatacatgttcattgcctggcaccagcttggctctcctggttggagagacacgggctcgttcctgtgtgtgccagctctctattcattccaggccacatactgggcttccctcccagagagccatcacctactctcacccttccagagtggtacatggaagaacagacaaatgctttaataagaagtgtgcagtttgggggccctacttaaagtattgggatcaacctcttcacggacagtgtgctgcgctcattactgatgacccatgctataggatgtagatggggtgaaatcacttcctgcttcaacacacgttcctcactggtgggtgttcacatcccaccactcttgctttagtctttttcaacccatgggggatatccaaccaaagtttctggtagagaaatcttcattttgcagaacttgttgcaatggtgtggttagtgttttcattttagtaaaatgatgtttatttctgacttgatgtcagtcttgggaaatccctctgttttcaaggcttgtttcaagaaaaacaaaatttgtccaaatccaaacatgttagtaatcttaaattttctatttcattcagatactctccacagactatcagcagtgatacaaaagagccaactattcatattcctagaagtcagtagcagaaaagagacagtactgtgcttatttaagtgctacaaaccaaaatgtatgttttctccaaagagcaatttaacaatttgaagaaaaagtacccttaaagtcaatttccacatatttcaaaggtcacttcgatttacgtatctgagtgttttttgtttgttaatagagaaatgatacggaaaatgtggttagacaccggagagtatagcgcatatagaaaaggtgattgaaatgattcccggggagttaaacaatcacaactactctggttcagatctgggttttttttgtttttgtttttgttttcaaatgagtatttaagctggctctagcttcaatatctagtgtgacttgtttttaatttttcaggtcacagtttggttcaagcccctgagttatctgggttattttttaagataaagagctattctggggccaggtgcagtggctcacacctgtaatctcagcacttaaggaggccgaggtgggtggatcacctgaggtcaggagtttgagaccagcctggccaacatggtgaaacccagtctctactaaaaatacaaaaaaattagccaggcatgatggtggatgcctgtaatcccagctactcagaggctgaggcaggagaatcacttgaacccgggaggcggaggttgcaataagccgagatcatgccattgcactccagcctgggcaacaagagtgaaactccatctcaaaaaaaaaaaaaaaaaaaaaactcttctgagaggtgtagccagggaggcatgttagtgccaaacagagattaaaaccttgaatcttctgacttctgatctagtacatgtgaccctatcgcctgaaggaacaaatgtccttgtagagttaacaagaggcagagaaaaagaagaaagattgtggtatgcaaaaggatacctatattatttccaaaaattaatttaaatagaagaccacgacaagaagcacttggttttcccctgtgggacatcttttgttgattaatttttactttagggcatcaaaatggggtcaattatgttacatcaaccaaaacaaggttgacacccctggagttgtgactctctgaccctgagcccctgactccatgacagcctgcacaagggggctgttagctcagtaattcggaaagaccttgctcacaaggtgggtggcggatggcatcacaaaataagtcacacgaagatgtctgctccagagtattttttgaccatattcctagagtctttctacctcccaggcaggaaacctcaccaggtaaaagaggaattcatgtaggaattgaggaatgtcacccaaaagacacctaaaatgctgcacgaattgtgtggcagcatcaggctctttagggcacacctatgtttttccacccctccactccagccaaaaggagggttcccactggctgcctctgtgaggccagcaccgcatagacgcagccctccctggtcctcaggtcctacccacagccttgtctcactagctcagtctctcaacagggaacaaatggtgtagacacagcccccactctcttctcgcagacacagtatccactttggagcttctcagttattgtccaggcccaggtgaagtcacagccacctcctctgtagagtcaaagcgtatgaattaaatgcatccctgtttttaaaagagccaagtgagagcactggtaatcactcctcgtgggcggccctgtgtggtttacaaagcactttaatgtataagaatcccttttaatcctccgaatgccttgggaggctccatttattgccctcacttctatagatgaagaaaccaaaggcgtagcaaggtcaagccaagatgcaagcgcgactgacacggtcccttggcaggccttgtctatacttctggtggcagggaattaccgctgccttccagttggttttatgtggcgggaaggtgacctcagaggtgaaggcacatcacaccagagggtactgctgtctgcatgactcatcactgaaattgttctcccaaccccctgacccaggccatgtatgccaggtttctgccctgtaaaattaaagattcccttctttccatactctgttctttggaagcaagtcacttagcactgcccacactcaagggatggagtagaattaagctccacctcccagaagcgggaggatctacataaattatttggaattcttccataagggagattggtctcttcttccctgctttcatttttcctggccttttactaaaagacactgaaatcaggctgatggattccctacatcaaatatcacacagatgtagcccatacttttgcagactagctttccttgaagcccaccaaaatgagcagaaactgaagtggatcaaagccccagtgcttgttatccttatttcggcccctttccttgctgggctaatgggatcttccttaaaatcataccgtgtccttcagtatttattatttatgagccaaagtgtgcatggccaacaatacttaaaaccaacccaggttacaggacatccctgcagagtgacagggtgccccacacctgcctgccccatgcctgggcggtgatttcatcgctagagttacacacctgtattctgcagggtaaagagaagaaacataattccatgtcttctcccaaaggaagaattctctgttaaacttcacacttttggagtgtgtgctgcatgagggcctcatgctggggacttcaggtgacactagactgcaggaaccccagtgtggttttcagagggcttcccctcaaagagagaagactaattgactctatgtcagggcggagacaacaaagaaagcagcgtgcttacgaggtgtcagatgcatacaattgctcctggtggagacgccacccagtcctcccagcaaccaccccgggaagctgtgcgtggccctattttacagatgaggaagctgaggctgggaaaggtcatcttctttgacggtcagaaaccagaaagctacccattcagacttggcatctgacctgagtgcctctgcaaccccaggtggcctgctgtttttttgcgtagtttgtaatagaggattagcaaaatgctgtcatggcggccctggtgtcatattttcaagatcctgccttccaccctcctcagccaccagctctgctcacataagatagagaagtttcttggctgaaagtcaggggcgagtggtggctcagaggaagggctcaggcaggtttgaagccctgactctgctgttcccgacttgtgggtgcttggtcatatttcttaatatctctgtgcctcagttgcctcaaatgtaacacggtgttgtggatgccattgtgctgtgcccactgacacttgcttaccagtctgacgtccagcttccagcacctgtgacattttgcatgaggctttcaccagagctctggcccagggtgggctagaaagcctggggaattgatgcccgtccacctccaggagcagcctcaaccagggactgaagggagcatgtgtatccataacccagctgcctcttctccagggggagcaactgtaaggcatgttcaacgccacctcttggagctccccagcagggctgagatccacctgccagtggtgataactggcttaataaagcaaactatattggctgccttctctccccagtcagtgcttcctgggatcacttctcaaatttaaccactcacactcaaatccttgtctcaggattggcttctgagagaatccaaactaagacaaatggggattatgcacccattttagtcaaagaattgtttaaatacctgtaaagtgcttagtagacatactgagctttcactcaatgttagttctgatccttaatccaataatacagccaaaggagaatatgttagcacataaaaaaagaaagcatcaagttgttttgccctttttgtaccaagagaggtctatgtgccatctcctgacttgtcggaaatagaagttacctggtttgcatttcttctccaccatctgggaaagtcacctgacttccaagcttcatggccatctgtaaaatgaatgacagaatgacagtagtcccagcgtcgtagggctgaagtgagggttaatgaggtaatacatataatattagaataggaagtgctcaaataaatgcccaataaatgttagcaattataaatgtttacattttcacaatttgacttccctacaaaaaaaaggcccatatcttgttatcaaacattagcttctatttctactactttacctttttaaaaaaaaatcagaatgctagaactaaaataagctaagaggtcacatgatctaaactcatggatttttaaattttaaatatgtttatgtatttaggaagtacgcatgcagaattctaacatgcatatgttgcgtagtgatgaagtctgggcttctggtatacccatcacctgaataatgaacattgtaacccaataggtaatttttccaccctcacctccctcccaccctaacctcatgttgtatctttgtcaagtaactttaggttgtaacctgtacattttttgtttattattattatacttctagggtacatgtgtgcaacgtgcaggttttttacatatgtatacatgtgccgtgttggtttgctgcacccattaactcatcatttacattaggtatttctcctaatgctatccctcccccctcctcccacccaacaacaggcccccatgaagctggaaaccatcattctgagcaaactatcgcaaggaccagaaaaccaaacactgcatgttctcactcataggtgggaattgaacaatgagaacacttggacacagggtgggggacatcacacacctgtacatttttaatacaatcatgtgttgtttaactacagggatacatctgagaagtgcactgttagagaattttgttgttgtgggagcatcatagagtacttacacaaagctagatggcatagcctactacatacctaggctatatggtatatcctgctgcttctaggctacaaacctggacagcatgtgacatactgaacagtgtaggcaactgtaacacaatgctcagtatctatatatctaaacacgtctaaacacaggaaaggaacagtaaaaatacggtaacagaatctcatggggccaggcgtggtggctcatacctgtaatcccagcactttgcgaggctgaggtgggtggatcacctgaggtcaggagttcaagaccagcctggccaacatggtgaaaccccatctctactaaaaatacaaaagttagctgggtgtggtggtgcatgcatgtaatcccagctactcaggatgctgaggcaggagaatcacttaaacctgggagatggaggttgcagtgagccaaaattgtgccactgcactccagcctgggtgacagagtgagactctgtctcaaaaaaataaataagaatcttatgggaccaccctggcatatgtggttcatctttgaccaaaacacgccattatgaagcatgtgattatattacatggtttagactctgggtgtggttagattccctggagagtattgatttttactttgtgttgtttgaacaatcaccaactcagttaggttcagactgctggctctgtcttgccttctgtggacaatgattctgatggctgtccagacagtggcagtgagaggggaagggacttggcctccccacggctcccagggctctttctaacacaagcaatttctccagtcttcagctttgcctctcaaagtctcactgccttctggccagcagtggaaatgcagaaagtgtacaaacaaagccactgaattgctggtcttgtgatgtttccttgtctatctccagcctctggaatccatgcagtaggtggtcagcatgaaggaaagggtcaaggtttctgtctctcttccttaatggaggagtgaatcaattcttggagaagtaataagagtgaatcacttcttgtctagaagccaacacattgaatacttcctataaattattacagtaagtgacatttagtcaaggaaaagccagcaattgctatggcctctaccactttcctcttatggattattttggggccagttgatataatcttgataaatattttcagaaaacttgtttccagttttgatcatttagaaacatttagtttctaaagttcaatatgttgtggttcaaacgattttttactatttgcttgttactagaaaaatagaaaagaaatgagtgaggctgggcatggtgtcttatgcctataatcccagtgttttgggaggctgaggtgggaggatcccttgagaccaggagttcgaggccaacctgggcaacatagtgagacccccagcatctcaacaacagcaacaacaaaaagaccttaatgagctttaaaagcatatactcatcttactcatctgtaaaggtttcaggtgtttgttttgcacgcgtgcttgtggatgaatacagttgacattactccaagaactcaggaaacattttatgagttccagtcctggctctccctcttgatagctgcatgacaaagatgtccttgggtttcagtttcctcatctgtgaaatgaaaacatagtaggcctccctggatggagtttgtctgaggatttgaagatccagtgcaggtaaagtggctagaatagtgtcattgttctgagagtttaaaaggttttgtttttttgtccaggaattaacgattaatgcaaaaagagatcatagaaaaaaatggagagtagtaatttatgagaaatgtgaccaatttgttctttcctcttttgtctgaggtggttcatgttatgaaagatcgtctgttccttgggctcctcaaatcctttttccttctcgctttatgagcagaagcttgcttttcctattggagagagccagctggatcgtgggtccctcttttcatttaggctcttgtcccctactctttatgtttattaaggatttggggagggtggggaggaggagtgggataaacctctgaaaaaaaaatgcagggaccagtttccttatttttaaattatggtctttaaagaaaaatgtcctaaaatctaccactagcaattactttttcattttattttcagaaaacgggctactcccttggcaattggtcctaggtttcaaccctcctaagagatttccacagccccttttatacccaagggtggaattcccctcgaaggccagcacccctccctggcagcaaggatgagttgctcaagggagcctgtccaacttgctagtaacgacttttctgatgtcatcattccccagaagcagctgcgagccttttggggatgatttgtattaacactctggcccagaggtgaccgggctcactctgatgataacagttgcccgtggggttcaaggtgaaaatctcatccaggtctttagttgttttctgtttttctgattcatatacatttattgaggtttaacttacatccataaagtgtgtaaatcttaagtactcggctcaacagaattttacacacatgcacacccatgtagacacagtccagatccagatccagaacatctctaatccctggtgtcctgtcctggcccagatcctccccaagggggactgccatcatgacttctgtcccacaggttagttttgcctgcttttgaacttcatataaacgaaatgctgtaggagatactcttgtgtctgggttctttcacacagccttgcgttcatgagatgcatccatgttgttctggagcagtaatgtgagctttttcattgaataaatacattccattgtctgaatttcattgtagtattccattgaatgaatatatccaatgtattcatttctgtccaaatgggcctttgggttatttccagcttggggctattataaataacattactatggacattcatttacgtttctaattaatgactgacatggcctttgtcctcccgtggtgaccctattttaaccaagtagtggtcacttacaaccatgaatgtagctttcagaatgtttggatgagaggaataaactggcgagtatttataaagtgacttgaactttacaattaaaagattatttactttgaaaagctgtataaatggttatttaaaatagttgtgtggcttctatcaagccattagtcatctctgagcctcagtttccccatctgttaaacggacataatattagtattgtgcaaaaataatagaattattgcaaggattagatgatagtgaagtaaagcacttagatggaggctggcccatctgagcactcaatattaatttctgttattaattttttatcataatgatgatataaggtaaagtcaaagatgctatgaagttgcacgagcttattaacacaaagcaaccaatgtaaaccaagtaatttgttttaatgccagatgtgaataagttgttctgctttttttcctactttataacctccttcgcatcaaccttgatttctatagttatataaacctttgtatttaaacaaagagatctcctggataagttggaagaggagaaagaaaaaaacaacttgggctggggaatctgatgattgtggggtcagcgttaacttttggcctcagttttaaccttgggggactgttttcattgtttgtacctctgcgttagatttatctttgtccctggccttctaataataggtaatcatttgaattcaataagatctgatccagcgtcaggaattccaaaggccagagagacaactcaactatttcttttgctttttcttttgagacagagtctcattctgtcactcaggctggagtgcagtggcaggatctcggctcactgcaagctttgcctccagggttcaagagattctcatgccccagcctccagagtagttggtattacaggtgtgcgccacaacgccaagctaattttttgtatttttggtagtgatgggatttcgctgtgttggccaggctggtcttgaacccctggcctcaagtgatctgcccaccccagcctcccaaagtgctgggattacagtcatgagccgccatgcctggcctaacttaactatttctgatcttatatgtaagtggacccattggcttcccaaatggaataaaattaaggtgtcatcattttatgcgtagatgctgcagcagaacccaaggggctcagatgagaatgtgcaaacgtgtgaggtcaaaaagctgctattgacaaagcagaggagttattattatataaatagccttcagcccgcatctctggatttatggtactggtcattttagtattagccaagaaagctactccactgggaaaccattcaatgaaggagggaagaataacgcctcccacacccaaaggtgtttcctaactcggaacagaaacacatttcacacatttttaacttttaattttgaaatcatttcagatttccaggaaagttgcaaaaatatcataaagaaatatctacccttcactcagattcccaaatgttagcacttcgccacatctgcctcattcttctttctctctcttcacacacacacacacacacgcgtgcacacacacagatacatgcacgtacacatacatgcacacaaatacgtgcacacacactgtctctcattttttctgaaccatttaagttgcagacattatatccctttacccctaaatacttcaatgcatatttcctaaaaacaaggctattctgtttaataactacagtataattatcagacctagaaaattaacactgatgccttgttagcactattaccttatctgcaggctgtattcgatgccccactaatgtcctttatagcaaatgaagaattttttagtccagaatctgatccaagatcacatactatatttaggtggatctatttcctcagaaaacattctttttttttttttttttttgagatggagtatcactctgtcacccaggttggagtgcagtggcacaatcttggctcactgcaacctctgcctcttgggttcaaacaattctcctgcctcagcctccccagtagctgggactacaagcgtgcaccaccatgcccagctaatttttttgtatttttagtagagatggggtttcactatgttgatcaggctggtctccaactcttgacctcaaatgatctgcctgcctcagcctcccaaagtgctgggattacagatgtgagctaccacgcctggccctcagaaaatattctaagagatgttgaatgctcattattagaaaatccttcctttaagataacatctttgctctcctgttaattggatgaccagttgaaggactaggtcaaaagaatgtcttctagcatatttgcctgtacttacagggatagggcatgaaagtaattaaaacaaatatatttcattgtattgattatatgcaagttagacatcattggggaagattcggtcttcctggcttttcagagaaaaatgttaacatgtgagttatggcgctgcttggtgttgtctgttggttggatgttaaggtgtacaatttgtgtgcctgcaaccaatgcatagagttgcagatgtccattgtaagaaagcagatgttgcatttcttctttcttcagacaatagtcatagtagctacactttctttggcagatgtggtgctggaaaaagccatgcacaagtgcatcttgaagcccctcaaggggcacgtggaggccatgctgaaggactttcacatggccgatggctcatggaagcaactcaaggagaacctgcagcttgtgcggcagaggaatccgcaggagctgggggtcttcgccccgacccctgattttgtggatgtggagaaaatcaaagtcaagttcatgaccatgcagaagatgtattcgccggaaaagaaggtcatgctgctgctgcgggtctgcaagctcatttacacggtcatggagaacaactcaggtgaggccgctggaagcccaggcttcgtgccgcttcccttccgggccggggacaggcctctctcctgtcaggctttctgattcccaatttctcctccctttggtctcttgatttcaccaagtggcttacagaactacaagtgattctctgatatccggcacattagtcacatgcaacagattaaaatgtaagcagatgagggcaacaagatttttgtaccaggccgatttaattaaagatttagttcagagtatggttacaaattcagtctctggagtctgagttcaaatcttccctccgagaagaagaaaattaactgagggactttggcccccttaatcaaccttgcacgctgtagttttctgcgtctttagccggatgtcaccctttctttcatgaggtggggattagctgagacagcccacacatagccccaagtgcaatggaaatgtcagcgattatcattacaacattttggccaatgagggtttgtgtcaatgacctatagtatgtgaaagaaactctgaacattcagttataatgaggcctcattagagccgcttcattggctagcccttctttgctacaagctgaagcaatataattgaaattcaccgaagagttacaatcttggaaagccagccctcagatttagccttgttgtttcctgtagatgcaggggtaaccatgaatcctggatagtaatggagccctgcattgtcccaggtcttcagtaagcttattgtaattctgaagacgattacgaacttttcttctgagtgaaattgcttaatggagaagcagcagagagaaaacacaggctgtattaaccactgcttgagtagacaggaatgtgtgtgcactttgggaattgttgagtgaagaagttaaaatatgagctcctgggcgtggtaatgatagcaagtgaacatcacctcacaagtttgcaagcatatttcacatataggaaacatattttctatagttcacagttatttataaaaattccccaaataatatctgaatatctgaattccccaaataattcagaaggattatgctcttctgaagcacagttcctcaacacacacactaaagacattaatgtagacaggataattcttcttttgggggctgccctgcttcctgtaggaagtttagcagcattccagatgtcatctgcatccccaccctccagttatgtcaatgaaaaatgtcttcagacagtgccaaatgtcccctgggggacaaaattatctccagttgagaaccactgatgtaaagaaaactagaagtaaacactaacattttttgccatatatttccattaatcaatgtgtatattcaacatgtactgaattggcacgtttaaagaaattaactgtgtgctcacattaaatacagagcaaagttagcttattcctggtttgagtttgaccttgtcattatgtttgtaaataatgtgcacagcaagaaagaggaagtaagacacaaagaattagcataagtaaatattttgtaagcattttataatcttgtttgctgaaagttaaaatattttaacgagtattctgttctatcacataattttatacaaattataaaagtagggagaaaatctgtaatgtgttcattggttcatagacattcattctgaaactgtaagggctggtctctaacattagcagctgggagggtcagaggctacataggattccagaaacactcacctctgtttataaatagcacagttccccccagagtgactccttgctgtctaataaaagcagcaagaaggatgtgaaagaaagaaaagttggtaaaaatattccatctccttctcttcctgctctcagggaggatgtatggcgctgatgacttcttgccagtcctgacctatgtcatagcccagtgtgacatgcttgaattggacactgaaatcgagtacatgatggagctcctagacccatcgctgttacatggagaaggtaactgcttttgagaaaagttgaaggaactgggtgctatttttttcatttttttataattgagacgaaattcatgtcacataacattaatcattttacagtgaataattcagtggcatttagtatattcacaatgtcatgcattctccacctttatttagtgtcaaactattttcctcaccctaaaataaaattctgcacccatgaagcagttacttgggtgcttttttgacatcttaagtgttaactgaattttttattaatttaaaagagtgtactaacctttttctgattgcaaaagtaatacacactcgtggtagaaaatttggaaaagtcaggaaaaacacaaagaaaaaatataaccccatcttaactatacttcactaagattgcttaatggcaataaaaaaaatacattcagtagaataaatgccattttttttggaagaaatggtttctttggctccaagaggaaattataaacttttgttgaggatatttccattgccaggaaaataacctgctcttatattagtgaaatggataaaagcttggctttgtttttattttttaaaatttcgttttcaaggtgaaaacagtattaatttttttccagttttttttaagtatcttttcatttttatagtaaaaatacaggggtgtggaatctgtgcagtttgctctcaatttacgttggcattcgggttccttctccttgtgtctgcctaaccccaacatgtcttagcagaaattccttctccttacacatagcttaggtattttacatggaaatgattaggatgtttggcacagtagtgcacagccttgaaacgcagaaataactgggactctatgtgagcttatcttttcaaaggagaacaaatcagggcctgtgcactgtgaatcctcttaatccatttttatatatccagataaaagcccagacaagccctgggggggattgtcacggtttcgtttttttttttcccgtgagtttcagtctgggcttgagtagaaaggtccatctctgacaggattccctaaggaatgagtcatcccagcattttccctggagggaatgaaatgcatttttaccacccccagaatgtgcccccttagtctcctcagtcctgtaatgtgaattcaccaggccttaacttttcctgtcggagggaccgccctccttggagcccgattatgcccttcccacgtgaccatgggtagtgctgactcaggatgggggatgaatatctctcctcccgtacccgatcccaggcaggtatgaatgggcctctttcatgctttcaccctttagcctcttctgtccccttattaatattactaaccatggaaccagacactccccgatgagcctccaaggccctccctggagcttttcttgcctgctctgccctgggattagacaggacaaggccaaacatgtggttttgcccagggaccaagagaagcatgttagtctacatagcatgctttccttccttccactgtaatgtttgttattaatacagtttggggtttggttattctttttcgagcttcgatcatgtttaattctagtaatataagtatgtagagctcttagggctttggggaaaaagacacgccggtttcacttagaaagtcgattctgttgctgacaatgtgcactcaggacaaacattgcttgtatcttgtggctcaaggatagaaacagctacttcctgcccctttcccagattggcccagggcaaggccctgtgttgatgactaatggacaggtggctgtcttctcctccacgaatcccacaagaaagacaagggcacagctagtgaggatacaaaagctgctggtgagctcgcacttaaatagagcctgcttccacttaaccgtgtctggggcttcttggctgccttccttgggaagtaggcggcccagttgggttggctgtgatcacagaccaggcctgcacagcatcgaactgaagctatgcagcctgggaggaagaggctactgagcagtggcaaaaatacagattggacttttccgtgcctgcccaaagtcctctttggtttgcggggtagcagccacgtctgttttccgctgtttaagcaggtattctcatttaccaaaaaggcgtcatagaatcccttagaagtgcacagctcttgtggtagggttatagtcttgctgaaatttaaaaccttctctaattgcatccacatgtttcaaagtgtggtcaattttgtgcttccagcatttgagttttctccttagcgtcctgaacagatgagagctagggagtctaaaatttgaagtccaaaggagcccccctccacccccacaaagattgtaacagttctccgagtccttgctcaaatcctgaccctccatacggcctttcctgaatacttatgttcatattgatttctcctgaaattctccatgtagcatctgtattctggattactgagtttcacacacagtcacatgctgatttgtttgtggggcgaatatttggtaaagatcaacaattcaaaactcttaactagggtgattatactgtaggtggcaaggtctggaaaacccttcagatcactctatacacaaaaagcttgacatgtgatcaatggaaagtgcatggctcagggtgacccagattatgccgcgggaaaaaataacctcaagtcttcatctgcaacctgaaaacaagaagggtatttttctttctcgtgttcatgtccagcacgagtttgcagggcgtgtggctcctgatccacatggaggggacagttgccatcttgcatattgccacttattgaccagagagaggcttctgcagggtctcacatgaataaagctaaatactttggccctaaaggtgacacttctgcacaaaactcatttcgccaaactaacttctggtccctgcaggaataaattgccagtgtctgttttttttttaaaaaaaaaaaaaaaaacaaaacacattcataaacttctggagagtggggactcagattctatttcttacaaacctactttcttctctgtagctgtggctcacagtagagattcaatgagtattttgacaaagaatgtctctaaatctaaaatatgctgtgcccaattagggaatttttaataaacattcagggcgacccctagtggctcttcagcgcagagaccataagttcctccccaggcacctaattatatgttaggacaaaaactatgaaggaatacatacacatcttacagtgtcgtcagccctttttacactcctcaagaacataagagatcattcctaaatacaccatcacaggaacatcactttcctgtaaattattttatcctaaatgccagatgttatgttagtcccaaaggaaggggggggtaagaaagggaatcaagggagagaaattatttttgaagtgtccacatttttgcgaacagttctttcaaagtgtatagtttacttaagatttagaaaatactcattgcgttttttcctttttacttttttttaaaccaaattcttgtttatcagagatagaaaatatcaatttctaaaagaaaaagccaagagcaagtgttgccacgagtctggactgatggaggggatactggccttggatcacctcacacgcctgactttccccccacctccccgtcaggccttaataccccaactactcctggcaaacatttttcataattgcactttaataatttcggctgggcatggtggtcatgcctgtaatcccagcactttgagaggccgagacaggtggatcagttgaggccaaggttcaagaccagcctggccaatatggtgaaaccccatctctactaaaaatacaaaaattagccaggcgtggtggtgcatgcctttaatccgagccactcgggaggctgaggtgggagcgtcgcttgaacctgggaggcggaggttgcagtgagctgagattgtgccactgcactccagcctgggtgacaaagcaagacgccgtctcaaaaacaaacaaacaaaaaaacaaacaaacaaaaaaaacactttagtggcttggtcagtctcacgcactagaatggaaatcccatcattgaaaaacaggaaccttgtcagcctggcttgtctgtgcccccttggcccctcccaggcctgggtcgctccagaaatctctgtgggatggctgtgtgaagggatggatggaggagtgagtgccatgctcttgggtgtgtgcttctgtgatcccacaaggaaatgcatgttgaagaaatactaaaaatacaaaacatgccttctaacgctggcatcccctgttatcacccgtgagcggaggttggcactgggaggacccactctttctgctcttttcaggaggctattacttgacaagcgcatatggagcactttctctgataaagaatttccaagaagaacaagcagcgcgactgctcagctcagaaaccagagacaccctgaggcagtggcacaaacggagaaccaccaaccggaccatcccctctgtggacgacttccaggtgtgcagctggccacccctttgcttccttcgtcctccaggaatgcggagctggctcacccagcacatcccagctcagaggtccccactgtgttgaattatttggcaggaaagggatatctcaaaccaccctctggccttgttacactgatctgttttctttacatttatatacgcatgggatacttggcccaagttttgctgtctttaagaaaaccaagttgaattaaggcagaatctctgcccaatcaagcagacgataagtcaaaaaggaggaggaagcacttggcacagacgttggagattttgtttcatcaggaaacagccgctgtgttacgcgatgcaattggcctagtttctctttgggaagagggagaggaacagcgatgtctccttcccttttctctcgcccactctccaaaacagaagaccccagaatctcagcagcagcagcaacagctatggcagccgtccacggcgcagagtgaccaggcgagcatctgagcgagtcctgctcaggttccctggccagggcttttcctgaccgtgagctgctgcttgggaatgtgggactcccagtgagcttgtttcttagaatggacaggtgggttagggctatagaaatctttacccaaggccaggcatcagggctcacgcctgtaatcccagcactttgggaggccaaggtgggcagatcacctgaggtcaggaattcgagaccagcctggccaacacggtgaaaccctgtctctactaaaaatacaaaaattagctgggtgtagtggcaggcacctgtaatcccagctacttgggaggctgaggcaggagaatcgcttgaacccaggagatggaggttgcagtgagccgagatcacgccactgcactccagcctggacaacagagtgagacttagtctcaaaaaagaaacaaagaaatccttacccaacacaattcctgatttgctcattgtctatgaaataatgagtgagttggcaaatgtctgcaaataatattttgaaggttttaaattaaatgataaaaccttcctgtggtttgtttctatgttccccatgatgagtttccaagcagggatgtggaaagcaagacagatttgtctacacatccagattcacctgcttttttttttttcttaagacagagtctcgctctgtcacccaggctggagtgcagtggtggcacgatctctgctcactgcaacctccacctcccaggttcaaacgattctcctgcctcagcctccggagtagctgggactacaggtgctcaccaccacacctggctaatttattttgtatttttagtagagatgggatttcaccgtggtggccaggctggactcaaactcctggcctcaactgatccacccgcctcagcttcccaaagtgctgggattacaggcgtgagccactgcgcctggccattttttttttttataagagctctgaaaatagagggtcagatgaggtggctcatgcctgtaatcccagcaccttagaggctaaggcaggaagatcgcttgaggccaggagttggagaccagccttggcaacaaagtgagactccatctcgacaaaacaaccacaacaaaaaattttcaagttaggtaggcgtagtggtgcacacctgtagtcccagctactcaggaggctaaagtgggaggatccgttgagcccaggagtttgaggctacagtgagccatgatcacaccactgcactccagcctgggcagcagaatgagaccctgtatcaaaaacaaacaaacaaaaaggcaagcccatctttgaaagccaagatcagctcattcttctccatgattgcagtatgctcagaaattccttctggagcgcataaacctaaagagtgagaatacacgcactgcactctccccaccctgttgcactaagaaggtccctgtgccactcagtgcctgcagacccctggggtgccatcatatagccatccagggaggggctgcctagggcagaacagaggaagtgaaaaaagttcattgttcctttccccacctgccaacacaccctcctccacctcttcacctggagaccctcagacaccatagagctgccttcttctgcagccgtcccctcctgccctcattgaccctgctcaccttggaggtgcatgccttctcagagtgtaaccgaagaaggaaatgttcagcactcggctcaggggtcaaagcaaaacctcagacccaaagctccatctggaacccctaaatcagaggccacagacacagaggtcttctcacatgggaagaggtagtacgtcttggtggtaaaggcggtggggctgcatctgccacgtcctagctgtgtggctttgggcaagttacgtagcctctctgtgcctcagtttctgcactagtcaaacagggattatgtagaccctgtctcttaaaaaaaaaggttcaaagagtgtcactgtcaatctgggcacctcccactagctcacctctcctgcaaagtcactgggctagcaaaagtccccactggaagcagatatgaaacatatcttacatgtgcagagctcactgtccttcccaagagctttcccttctgttatcccaggaaaccctcgtggtgaccttgcaggcacctgggcagagagccctccttcccttcactgctgagcagggttgccagatttagcagaaaaaaatctatttgttttctagctgaaactcaaatttaactggctgttctagatttcatctgataactccactgttaaggaaacagaagcaaagttatctggggtcacaaaatctaggagagcctgatgtgagtttaagattctttatgcctggtctgggctttgtatcttgtaaggccacaggtttacatgtttcatgatagcatgtacctggcatgattgcagcacctgagcctgcaaacgtctttgtttaattccctgcagcaccaccttgcatgtaatcagctccatctgcaaagtatttggcaaaatcaacattcttctccttctgactttttccacattgtgcccagagccactaggagccttgtattagattgaactacatgaaatcaccatttgggggagataaaaaatagtcaaaagtcagcgcattttgtgtgtgtgtgattcaacctaaatgattgcccttgcttaggatttatttaaaaagtttgtcaaaagtgaacacaagccaggtacagtggcatgcacctgtacacctagctactcaggaggctgaggcagaaggatcacttgagcccagcggtatgagtccagcctggagaatatagtgagatctcatctcttaaaatgaaaagaagaaaacaaaaagtgagcacagtacgtgcttttgtgtctagatattttaaatctctttctgctgacttccttcatactcttgtgctatttggtttagttttcaagctgggaataaacccagcattggatgtggttcacactcttaagcaggggtttcttaaccagaccttatgagggaaatggaaagatcagaaccagggctgcatggacttcctgcttcttacagttgcaatgaatcatgtagtcatcttcgccactgtccaaagtcagatcagcctctttccttgccattcgaagcctcgtggcctgacatcggacattatgacaggaaagggcctggaaatggcttacagttaccccctcccctggtcccccatcatgctcactatctagttttctcttctgactgtctcaacattcctcttccacctgcagaattacctccgagttgcatttcaggaggtcaacagtggttgcacaggaaagaccctccttgtgagaccttacatcaccactgaggatgtgtgtcagatctgcgctgagaagttcaaggtgggggaccctgaggagtacagcctctttctcttcgttgacgagacatggcagcagctggcagaggacacttaccctcaaaaaatcaaggcggagctgcacagccgaccacagccccacatcttccactttgtctacaaacgcatcaagaacgatccttatggcatcattttccagaacggggaagaagacctcaccacctcctagaagacaggcgggacttcccagtggtgcatccaaaggggagctggaagccttgccttcccgcttctacatgcttgagcttgaaaagcagtcacctcctcggggacccctcagtgtagtgactaagccatccacaggccaactcggccaagggcaactttagccacgcaaggtagctgaggtttgtgaaacagtaggattctcttttggcaatggagaattgcatctgatggttcaagtgtcctgagattgtttgctacctacccccagtcaggttctaggttggcttacaggtatgtatatgtgcagaagaaacacttaagatacaagttcttttgaattcaacagcagatgcttgcgatgcagtgcgtcaggtgattctcactcctgtggatggcttcatccctgccttccttcctttctttttccttttttttttttttttttttttttttacaaagagccttcatgtttttatatatttcatagaaatttttatagcagttgcaggtaaactgtcaggattggttttaaaatatttttgtaactttaaaatattctataattatgcatgtgattttaacatttaatattcaaaaataaatctcttgctggatttgagagtattgcatttttaaagtctctcttctgtaactggatgttttggcaactttgtggggagagactgctggatttcttaaagcaacgtattcctgacactggccacagaatgcctttggaaatcggatgtactgttctcttgttcacgtttagtggtgttttgctgttttgttttttaaacaaatgatgctgagaataaggagagaaatgaatgtagagagaggtagagagagaaatatgaactctaacaaaggactgaggagtgcagtctgctggttcaggctcttcaaaagatgtagaaaaagagatagaaggaaccacctatgcttaaaatactgtaaatatgcagtgaggtttggcaaaatctattccatgtgtgatttgcttgtagaaacaattttgaaagccccttgaggaaaataaaaatcaagaagaacacttttctcccttttccatacaaattaaaacttaacagcatcaaattattgggaccagaaaccaagtaatgtataatgtggcttttgttgagttaaataagatgctatataatggagaagaatttgaaaatgcacaaaaaaatcaatctacattatcagaacctgcagtgaaattaaacttatgttaaataaaaccagtttgcaggtgcacaaactatgagggtcttgtatccacgtaacacaggtagttacaaaaacatgttattgtactgtgtaaagatgcatagtcatctcatttggttggctttgtaccttgtaccttttttagccttggcttttgttgaactagaaccctcagcacatactgtgttgtacttttgtaaatgattttttaaatggaattttgcacataatacattgtaatactgtatgataatcatgtgtgaaaataatttttgaaatatcctttggctgtttttttttttctttagagtaagaatatattcatgcaccacgcagtgtcatggacagatgaaatccgaaccagggtttgtggttagacaatgtatcgtgggggtgagcagaaaagctcacatttctcagaagctcctcctgatatggggcaaaagttaaggagcagaaggaaaagatcatcctcccacctgaaagtgttttcattgttatctagtgctgtacttggctcagtgggacttagagcaaatcacaggtaatttgaacccggagttagctggggtcctgcagacagccccaccctgtcctcacgtaacctctgcaatgccctgggtgacagttcagtgctgttgcaaaattgatagcgcagaggcttggactcctcgctgccatactccccatgcttggaagggtgcctggcatatattaatagtaagtgctcaataaatccttgctggctgaaggaaggaaaacatgagtttagaagggtttctaactcatcagtgggagagatccgtaaagatcagaatgagaattgaatgggctgcctgcttttgatatttacaacggaccaaaagatgacagctcaatccatatggttgtcctcccaactcttcaaactaagatcatcatgctttgttgatttaaagcaggtcacagcctctggatgcgaggcagccttgcagccttcggtgggacgagagcgggctcagaagaggaaaaggtagcgtgggcagaaagcaacatcacaagacggtccctggttttgtcattgggcaatgtttccccgttaaaattacaacacaacatgtgcctccactttttcccccacgcaggcatttctcacttctcaaattgccaggaaacagacttgggtgaaggttggagggaataagaggagagtaaaaatatacatgctgggtggaggaagaggagaacgcatttccaaatttaaaaatacattatagctgaggtgggaggatcgcttgatcccaggagtttgagggtgcggggagctatgatcccgccactgcgttgcagcctggacgacagagcaaccctgtcttccccctacaaaaaagtaaaaataaaaacatgttataaaagttgaacgccggccaaaggaagggatttttttttttttttatgttgcatgcgctgccaaatactttcactctagtaccacccccacacccccgggacacagaatagaaatagaaactgttgaagtagttcatattatgtggaggttacaacttcagatctataagaaaatacaaaggacaggaaacccagctatgaatgcttccattcacaaatgcggttccgtcctcattgggcagctgttaccttcatcttctttaagagacttgaaatgaggcagcgctccaatctttaacgcctgctcatgccgtcatgcctggtcacacctagtcactcctggtctcctaccagcagtctcagagaaacagaaacagcacaagaaggactccgaagggcacagtgtgtgtggaacacaggcattttaatcatctggcagtatctgatagtaaaattctaagtgtcctcattttttcggcccattttcatgatggtgaatttgagaccaaaagtactttttgtcatttggttaactctaattcagttggaaatatgggaaagaaatcgcctaacattgcaaaatcctaaatacgtgataaggaaaggaaggaaagaaggcagagaggggccaggcgcggtggctcatgcctgtaatcccagtactttgggaggccaaggtgggtgaatcacttgaggtcaggagttcaagactagcctggccaacatgtgaaaccccatctctactaaaaatacaaaaattagccgggcatggtggcaggcacctgtaatcccagctactcgggaagctgaggcaggagaatcccttgaagccaggaggcggaggttgcagagagctgagatgaggacactgcactctagcctgggcaatagagcaagactcagtctcaaaaagaaaaaaaagaaaaaaaaagaaggcagagagggagggaggaggaaaacatctggcatttgtctcaagaaacaggttctgattagaaaaagatcgattttactccaacatcaaaaatggtggcagttggcacaaacctttcccccatgaatactagctttggaagaaatgtaggtatgggaagttaaaaatatatataattattctgaaaggtctgggcatgtaacctttttttttttttttttttttttgagacaaggtgtgactgtcactcaggctgaaatgaaatgcagtggtgctatctcggctcactgcagcctcaacctcctgggctcaagcacaatcctcctacctcggcctcctgactagctaggactacaggtgtgcaccaccatgcccagctaatttgtgtttattttttgtagaggtgaggtctcactatgttgcccaggctagtctcaaactcctgaactcaagggatctacccccctcagcttcccaaatttctgagaaagtgtaaccaaggcctcccctcagaagtctccctggagaagcttcagttggagtgaggtggttgggggtggagatgggggcagagtttcttatctcgagtctgctataaattctcccatttaaaagtaaaatttgcctgaactctgaggctgcatgtaagacacttagactatcattacattaatgaatctgagtatttcctttgagtgcacacattagaactactacagccagccctcatttctcactgctggggaacgggggtggtcagatcctgccacctgtggagaggggctcagaacctgaggaccacgggtggccagggaggagctcctagacggccttcacctctgtaaccagccttcggtttcctgggggaaatatcactacacataattagctccattgcttccctttcttcccatttccccaccatgattctgtgggctgggttttccctcacgtagtaggtttgagggtgctcttaactctattccaagcctccttgccaaaaagcaggctctgatccttttcacagtttgtttcttcagttccaaccagagactcaaaaagtgtgaacccggccccactgcaaacattacccgcccacactatctgtcaccaagacccagtgtccgttgttccatttgaataggtggctctcagctttggctgtcagcttgaagtcacccggagccttttaaaactcccaatgccccagctgcccagaccatcagaatctctgcagaggcgacccagccagccatatttattttaaacttccaaggtgcttctgctgtgaaaactactagtttagatcaaaatctggattttaatataaaaacacacctgcgagaagtaacacctttgcctaaccaagaccactgacacctaaccaagcatgcattctcaacctgatttggctggcagaggaccatggaacatgtacttctagcctggtgctatcccgtagaaatacgaagcaagccacataataggtaattttacatttactagtggccacatttttaaaaatcaagaagaaatatgtagaatcaattttagtaattttatttagctcatgatatctcaaatatatttcaacaaccaatcaattaaaaatattaaagaggcattttacatttttttattttttatattgtcttcaaagtcttgtgtgcattttgcacctacagcacatctcatttcacactggccatgtcttaaataaccaatagccacatgtggctggtggctaccatattggagagtgcagttctagcatatcaactagggatgatcttaaaagttaaaaaaaaaaaaacggtatgtgtatataaaataaaacacattcacaggttacatctacaaaggaacagacacatgcatcctgtcaaacgtatgtacctattactagccaaggatgaaaatagcatcttgcctcttcaggcactgctgtaaggcaaacataaattgatccatgcaaagtgcttagaacatccaggcaccacaccacaagcactgttaaatgttacttattatgattattagataatcgactgctttggcatttcacccctactgcttatttctgcttacccattcatgctattatctgctggcaagtttcttgtgaaacagaagaaaggcagtaatgggtatcaaaggtttaagaaaaatgtactggggcgggttgctcaatgtaggaagatcaaacataaagtgaatactagtcattaattttattttatttatttatttatttttgagacggagtctcactctgtcgcccaggctggagtgcagtggcacgatctcggctcactgcaagctccgcctcccaggttcatgccattctcctgcctcagcctcctgagtagctgggactgcaggtgcccgccaccatgcccggctaattttttatatttttagtagagatggtgtttcaccgtgttagccaggatggtctcgatctcctgacctcgtgatccacccgccttggcctcccaaagtgctgggattacaggcgtgagccaccgcacctggcctaactttattgttgttactgctgacggtggtgatggcggtgatggtggtgtgtgcgtgtgagttgggagtagctcattttccccagtattcaatgctggtcaagagcatcatcagggcccatagccaggggtgactttcgccaagaagggagaagggagcaagggaggttgcaaagacgtcttgctagcttcccagtcacgggcagatcgaaatcctaagaggaaccatctctgcctgcacaagagtctaaaatagtatttcccaaaaaggaattattatttaagtaaaagcataattatagtcagtgattattttaaccactttcctccacctttttccccttttactttattatattcacgaatttatatgtccatttatatcatttaacaggactattgtttaaaacttggtgctttaccaagaagaatacagaggttgacgtgattaattctttttatttctgatgtgcgtgcttccgatttctcaccacttctacaaattatgagagaatgcatttatttaccagattgcagtttccgtccattttatctttctcactcccatttttctctgcagcctattgatgtacgatcatatgcagaaaagacttatgcatctattatctactgaaagaaaaactacagaaaacaataaaatgctagagactctttaaccaatcagaaaaaaatacgtaagtgaagcagctacgacatcacaaagcttctatttttcgctagcacatgaaaatatgagacctgacaaattgcaaactctcattgaacagatagtttagggttttgccttgaaaaccatagtccacggatcaagcatcacatcttttgggagtttgtgagaatctcagacccctggcagacctgctggatcagaatctgcattttaacaagattcacgagcacattagagttggcttgagaagcattagttcaaggtatatttggggccttggcatttgtgcagctgatacaaatacacaaatgtaggaggtgtgctgctcttagaaccctgcaggaaaggagaagaaaatagctcataattgttttgctaagagtaaggcataacttcatttaaaatcacctacattatggacaaaaggcttaacaaacaaatgtcaggaaccaagtttttacctcattatatatattcaattatgttcttcttgctttgacagggaaaaggggcttgaagggcgtggggaaaagattctgaaaattaggtgggattgctgaagtcaaacttaatgattttgctgagtttgctggagagtggcttctctcacctccaacatctgtatgagggcaaacaggagcagcggagggggatctctctgtccgggccagctgcttgcacatgcatgtgtgtgcacgcacggatgtcgtcatgtagtctgcacaattagtcacattgtctgcatgtgacatgggaagtttataagcttttttattttcttaaagaacagctggtccggccacagtggctcacgcctgtaatcccagcactttgggaggccgaggtgggcagatcacctgaggtcgggagtttgagaccagcctgaccaacatggagaaaccccatctctactagaaatacaaaattagccaggtgtggtggcgcacgcctgtaatcccagctactcaggaggctgaggcaggagaatggcttgaacccaggaagggaaggttgtgatgagccgagactgtgtcgttgcactccagcctgggcaacaagagtgaaactctgtctcaaaaaaaagaagaagaagaacagccaacttccttttaaaggcatttcattccctgagaatctactaatcataagacccttttactcaccaacttcgaaaaacaaagatgtgtttaataaaacctcttcggtgagcaaggagtggatgatttaaaacatcgctggaaaaagctcctgtggaatccccagcagacaatttcaaagggaaagtatggtgaatttcgcagaactctttcatttctccaggtaaccattgtggacaatcctgagccctcatttgtttttccagatgacactggtttactcacatgattttgccttatgtttttcaaggggaaggaggattttaaaagaataaacacaatacatggttttcaaaatcaaatattggaagacttgcaatggaaggcagcagcccctgagcctcctcccaatcccatttctgttatctcctcccctaaactacgtctccagctgtgtattcattatttatctccatacttctaaaaagatgctgatactgctgcttattggtttctttttcttttctttctttcttttttttttttttggagacagagtctcactctgtcccccaggctggagtgcagcggcacgatctcagctaactgcaaaccacctcccaggttcaagcaattctcctgcctcagcctcctgagtagctgggattacaggcatgtgccaccacacccggctaatttttatatttttagtagagaaggggtttcaccatgttggccaggctagtcttgaactcctgacctgaagtaattcacccacctctgcctcccaaagtgctgggattacaggcgtgagctaccatgcccggcctctttttcaatattagacattaataattgattccatatcatggaaggtgaggattgaaccttcttgtatggtggtcctctccttagggtgaccatgtagcagcctggtcatatgtcaatgcctgtggggcttttctcctgggtcaggtggtttccccacaagaaaattctccagtatcctacgggcgccgggtgcaaagtggggttaaattttgttgccagcgttctaggagctaagcaggcaaggagcctgtgggttttcagctttccgtctgccagctttcacctcctcccatttccaatgcagtgtctcaacgtcacttttcgctgcctgtgctctgacggctcagggacatggcttctgggtctctccaggagtgaggcgctcatcttctcccttcactcacacctgccagagctcattcctgagcccgctcagacgctgcatagggaatcgattgccttgcttcctgctggcttttccgcctgacattggttaacatctagctttctcctgtctgctgagttttcaagcccgcaaaattttgttaccagttcccattggctgctgtctcctcttccattctttttgttcctatggatgtatgcccttttaaaaattcctttttaaattttctttaattctcattttagtgaggtattggtaggggaaagataggtaatgcagcctgccttgtttaattgaaacctgtagttttaataagaaaaaaaataaataataaaataataaagaaagaaacctgtagttttacatttgaatggtgaatgaacttatacatcctagttagcaaaactgaaaatagattattacaatgataggccagagtcaatgcatctatcttatccagttattattttatataaaaaatttcttatatgaagtcatccaaacatccaagctgtttaattgtaaagtatgctgcctaggatatatcaaaatatatatttactgtgcactttgtcctttccatataatctgaaagaaaagaaacagagcaacaacagatgaaccatcaagctgtttgcttgttttcaatgtggaattttgcaatgatggatgtgaatctgggtcagcactgtttacagagagcacatggtgttttgtttcaatgagcaggaaaatgtttgccattaaatgtggtaaaagcttgtagttttttccaactaagcagtaaaagaaattactctgtgtagaatgataaataaagagttctatgagtcatctttaatgtaggggaaaatgtgcagccgggatagaaacagtgttttactgccggctaaaaataaaatcaaatgcactgaaacagaagtcaataacagcatgtcctagaagcccaagtaactgtggggtttaacgtagttcatgcttttcaaatatacttcttaaaatgatggtgacaaaaatggaaagactatgctgatccttccttctttccttccttccttccttctgtcccctcccctcccctcccaccattatttatctccatacttctaaaaatatgctgatactgctgcttattggtttcttttcctttttcttttcttttttctttttttgagacggtgtctcactgtgttgcccaggctagagtgcagtggcacaatctcagctttccttctccctttctcccctcccctctcttcccttcccttcctttcttttttaaaaacaccatgctggagtgcagtggtgcaatcatggctcactggagcctcaaactcctgggttcaagggatccccctggccttaccctcctaagtagctgggactacagacacataccaccatgcctggctatttcttcttcttttccttctccttctccttcttcttcttcttccttttttttttttttttttttgtttttgtttttttgtaaagatggggtctcgctttgttgcccaggctggtctccaactcctcaagcagtcctcccaccatagcctcccaaagtgctggtgattcttctgtttaaagtcagatttattaaggtataagtttgataaagtaaaattgactcatattagtacacatttgatgtattttgacagactcatttggtcatgtagccaccaccatgatcagtcccagcctgggcaaacattggtctgttttcttctgttcctataattctgccctttcagaatgtcatataaatggctgggcacattcactcatgcctgtaatcccagcattttggaagactgaggtggatggatcacctgaggccaggagtttgagaccagcctaggcaatatgtcaaaaccccatctctactaaaaatataaaaattagccaggtgtggtggtacacacctatagccccagctactcgggaggctgaggcaggagaatcgcttgaacctgggaggtggaggttgcagtgagccgagatggtgccacttcactccagcctgggcaacagagtgagaccctgtctcaaaaaaaaaaaaaaaaaaaaaaaaagaatgtccatgtaaatggaatcacagggtacacagacttttgattccggcttaaatattcatacagatgttttgataaaaacgtaacttttcgtttccctggggtaaatgcccaggaatgcaattgctgggttaagtgatagttgcatgtttgcatgttcaatttgtaaagaaactaccaaactgttttccagaggggctgcaccattttatattcccatcagctatgtatgagtgattctgttttgaagtttttagtacatttcagtgttaaactgctgaaattgtcagattcactaggtttaaaacacatgcactgttaaaaatgttttatttctgaaagtgttataattatatttctagaaatgttataattagactccagcataaattaagtcgctgatacaagggggaaaaaaactcatgctggccttattcttctcccccagaaactttaaacaccagaaaacaatggagtaatgatgtttacaaaatcttggaggagagaacatgggatccaggaatatccagccaatattccacttgagcatcctaagagacaagggcgctctgtgaatagagcaccagcaccatgagcccgaggaaaaacaaagcacagcaaagtcaaacaaacaaaagctcagcagagaaacccagccaacccatacatgcatcagaatgaagaatggaaagggaaaagctgtaagaagaaacaggaatgacaattacatccactcaatcatagacttaaaaccaaacaactaggtgatatatagttgaaaaactgatgtggctttatagagaatggtggcacacgcctatagtcccagctactcaggagctgaggcacgagaatcgcttgaacttgggaggtggaggttgcagtgagctgagatggtgccacttcactacagcctgggcaacagagagagaccctctctcaaaaaaaaaaaaaaaaagaaagaaagaaaaagaaagaaagaaaaagaccagtcacggtggctcacgcctgtaatcccagcactccgggaggccaaggctggtggatcacaaggtcaggagttcaagaccagcttggccaagatggtgaaaccccgtctctactaaaaatgcaaaaaaagtagccaggcatagtggcgggcacctgtaatcccagctactaaggaggctgaggcagagaatcgcttgaactcaggaggcggaggttgcagtgagctgggatcacaccactgcactccagcctgggcgacagagcaagactctgtctcaaaaaaaaaaaaaggcctcgtgtggtggtgcacacctatagttccagctactcaggaggcggaggcaggagaatcccttgaacccaggaggcagaggttccactgagctgagatcttgccagcgctccagcctgggagacagagcgagaccctgtctcaaaaaagcaaaaaaacaaaaaacaaaacaacacaaaaaaagagtaaatagtgccctaaattgaaatttctattaaaaaatctgattttgaccattaattatcctcattaggagattgaaattacatttaatacatatataagataatactatacatatcttaaactttacaggaaacttttaggagcttttattttgtgctgctcagcaatctctttattttcatatttatttatttatttattctttgtattattttttaattttttgagacagagtcttgctctgtcacccaggctagagtgcagtggtacagtctcggctcactgcaacctctgcctcccgggttcaagcgattctcctgcctcagcctgacaagtagctgggattacaggcgcccgccaccatgcctggctaaattttttttgtatttttagtagagatgggatttcaccatgttggccaggctggtctcaaactcctgaccttatgatccacccgcctcggcctcccaaagcattgggattacaggtgtgagccaccgcgcccagcctatttatttatttatttatttattgacatggagtctccctctgtcgcccaggctggagtgcagtggtgcaatctcagcaaactgcaacctctgcctcctgggttcaagcgattcttctgcctcagccttccgagtagctgagattacaggtgcccaccaccacgcccggctaatttttgtatttttagtagagatggggtttcaccgtgttggccaggctggtctcaaactcctgaactcaggtgaaccacctgcctcggcctcccaaagtgctgggattacaggcgtgactcaccgcgcctggcactctttcattttcatttgatttgtttttcttctgttaaattcaagaaaaaagtcaagtacagtaataccttatacttcataatctattaacatatataattagaatcccttttaagtaaaagtctctttctcactccccttaatctacatagagagatgactgaaattatctgagagttaacatggtttattcccaggtggcaaaattttcaatgatttgttgctttattctttgtacatttccacaagtctttgatttcttaataatgtgcatatatcctttttattaaaaagtctttaagaatgtaaatagccctaaaaggtatttttaaaacccataaaacaagtgtgtcaacatgtagacttttctggttgaagcaagacaataagaggaaagggaggcggcttccaaagccccacccatctcctctaagctgctcatcggggactatgagcaaacatcacccctccagagccatttgtgctaaggtctatgattgagggctgtgcctctcctaactctacatctccagattctgatccttcaaaatgcaagatacttaatttcattatttttcttaacaaacacttatatggcacttaaaatgtggcaagcactgttataactgctttacaaatattaactcatgtaatcttcataataatccaatgaagtaggtgctatgattatgcaccttttacagaaactgaggcaaagagaggtgaaatacctttgttgagaatgtgaataccctctttgtaaactaccaaggatgacattatcttctgggtaacctgtgtgccactttttcactcagctatttaatcaatatttgctaggcacttactggccacccttcgagatgctaattcataggaggcaatcagcaatggaaactgataacagtttaaaaataagtagacaaacaggagagaagggagaaccagctggtgaatatccaggatattctctgtactgccctgcacgttcccctgaccccatgtgttggaatggccacgtagctataggatatttctgatctgtgcctcaaaatcggaataataattcgtatcggtgcttgcaaactgctggcctacagcatccagtttctgcagggttccaatgctacctttgtgttaaacccacagtgtttttttctaaaaatcaaaatcatgtttattccaccattacctagatacaaacataaagtagctataaacttctaatgtttataataccaatgaatcagagccaaaaatattataaaaaccttcactacttcataaggaacaaaattcaaatcaacattagttcatgtcacacacaaaaaattatgaaacactttgaaatggccagaaaaagattactgtttagtacacgtttccaggttttctctgctttttattgtctttgacaatacaaaattttacaaatttgtaagctgaggaaaattgatagtaatgaaaatttttcttgtccataaaatacaaatgcatagtgttatacagtgcccaggagagacagtgattacagctctgtggatattgaccagtttaacactcatgtgtaaatacatttcagcattcctgcttgctttatgtattttatctctctttatcttatctttttgagacagggtcttggtgtgtcacccaggctggagtgcagtggtgcaatcatgtctcagagcaacctctacctcccgggctcaaatgatcctcccacctcagcctcccaagtagctgggattacaggtgtgagccactgtgtctggtctgaataaaggaatttttaacttttaattttaactactttaaatttaaaaactgatgtttggttcagcgatttgaaaacagtatatttggaaccgcttggatatgagaatctgctttttaaccatacattgatgaaatctaaatagagaacaagcatttccgatgacagctgctctctcagattgaaatgcactgcaaatgtaaaatacacaccggatttcaaagtctttgcaaaaaagaatgtaacatatcacattcctttttttattgattgattacatgttgagtattgattggttacatgttgaaatgatatttcgggtataataaagtggggtcagggaaaaatatttttcccaaataggaaaaataaatgggtaaaataaagcgtactatcaaaatcaattttacatttcgttttgcttttatttatttattatttatttttgagaccaagtctagctctgtcgcccaggctggagtgcagtggcgagatctcggctcactgcaacctccgcctcctgggttcaagcgattctcctgcctcagcctccaagtagctgggattagaggcgcgtgccaccacgcccagctaatttttatttctttccttttttttttttttttagtagagagggggtttcgccatgttggccaggttggtctcgaactgctgaactcaagtgatctgcccgccttggcctcccagtgttgggattacaggcgtgagccaccgcgcccggccttctttttgtttttaaacgtggtattgacattttaagatgacatctgcaactcgcaacactgggacaagggattctgggtcataaattctcccattcctcatttactctgcagcaccgggtggctgcgaactccgctcttctgcttgggtttccgcatcaccagcagcttctttccttcccaggtgtcgccgcctgctttctgcagccgctgcctgggaggggttccgaggttctgggcagccacagccccggaggccttacaggagcgacctggcaattcccgccgccggccgccagaggaagctgctttgctgctgtcgttgcccagcaactcgtagcccggaagcagtaccccgtctcgctcggttccgcggcggccacgctccgggagacttccggcagggcgggcgcggggtcttggcgaacggtcttcggaagcggcggcggcgcgatgaccacgctacgggcctttacctgcgacgacctgttccgcttcaacaacatgtgagtgacacgcgcctagggccagccgctcttggccgggcctcgcttcccggccccgccagctccggccccagccgcgccttcccggccggaccccaagcccggacggggacccgcgagaaccaccccccgccggccaacgtgggcgcctccctggggccacagggtccagggagaggtgggcctggagtcgacgcacgccggccttggcgaccttggccgaggtgctcaaactttgtctctggaccctgcgagctggcaggttctggggcagcgctcgggcctccgctcgtggtcgctgtcaggaggcgctggggtgatggggcgagctggagacgcggcctggagcccacgacctgggcttctcgccctgccctactgcttgctggttcgtggccgggccgcgcctcttctgggcagagggcaccgccgacggccaggccgcagagggggcttgcgaggatcggaagctggtcagcagctgttgggatgtgtacatcgtgaagcccacctggtggccgtggttaaattgtatccaaatgaaatgacactgatcactgcgtcccctgcagcagatgctgtctcagtcatggttagtgtttgcaagtttagttactgtagctgcgcaccccggtgtacacacctttcctctgtgaggagtcacggcagatcttaggggaggctcgctgtgcccagagccctggatgcagtttctttggattcgagttaaggccagacctctgatttgcaggtaccaattttttttttttaagaaaacattttattatgaagattcccacacatttagaaaagttggaggaatttcaccatgtgcttttatagacacttttcctggattctgcagttaacattttgctacgctggtatctctccttccttcccatctatcagtcctggatccactttaaaaaaacaacagggcggtatgtgaaaactaaggacaaagtggttccgattcaagtgtcaggaagatggaaagaactatgggataagatggctgggaacatttcaaagagggggtgagccttgaagatggataacacattggtaagtgaggaagacggaagttccggagaaggagcggggcatgaaaatggggaaacttgaagtgcggtcagacaactgggatcagtgcgaatctagtggctggtttctgccactgagcagtcaggaagaaatgggtgaaacaggaggggtttagacttgatcctgtggaaagaattttctgttgggccagtctggtagctacggtgacttgtgttgaactcactgttccctgcattgttctgagtgcccacgtaataatccagttaatcctcacgattctttgaggtgctgtcacccccattttgtgtatgagtaaaccaaggcatggcaagcacaagtgaattggcccaggtgagaatgagtaaagcgaggaacttcatccaaggatattggctctggagcagtggttctgaaagacttggtgcctgtggtcaggggaccatgttagaaacgcacattccgtttgcgatccactgctctggagtgggtcttaacccacctggagcctctggagaggctcaccctctctttaaagtgttcccagccatctcatcccatagtcctttctatcctcctgacccttgaatcggaaccacttggtttttcgttttcacttactgccctgttgtttttaaaagtggatctaggattgataggtgggcagagagaaatgatgaagccagtgtagcaaagtgttcactgtagaatccaggtgatggattcaaattcttaaccactgagctctgtgggctgtcatgtgatgacagcaggtaaactgggcaggtaagccattcaggaggccttggcagtggcccagagacgatgacttgacagaggcttcagtttgggaggtgcagcatgggaggtgacagggtgccttgaagcttcaagaaaaggcagagcctcatggagaatcagttttaactgaagatctaggaaaggacaacagttttacatggaaatgaatagaaagaaaatacacaggaacacttgcaagaaaatattagatttcagagaatcatgtggcctcttcagaaggtgccagtaggggaactccacttattccccattttcttttattttttgagacagggtctcgctctgttgcccagacaggagtgcagtggcacaatcctaggtcgctttagtctcaagctcccaggcccaggcaatcctcctgcctcagcctcccgagtagttgggactacaggcacgtgctgccacaccccactaatttttaaatttttttgtggagacagggtcttgttttgttacccgggctggtctggaactcccaggctcaagtgattctcccacctaatccttccaaagtgctggaattacaagtgtgagccaccacacctggttcccatttttttgtatttacttgcctctttgattagggcattttggtagaaaactctgagaatgactcagattagatgatgcagttggaattgaaataatccatggatgtagaacactgcaattaatttaacacatattttattcttggaaaaatatttgagtgcctactgtgtgccagttctagagacacagcagtgaacaagacataaacaaaaaggtgtctttatagaatgtagattttcccctctaaacaccttaatgtatcataaagtagctgtgacttcatagaacacctgaaacaattttggggaccccctcaaatcctggcccacaccttgggaatcacagtgcggggagtcatgtggaacttagtgttcagttacaaaggaaaatagaagcagggaaggaaagctggaagtgagtggggattcagctttagtttgggggttcagggagactgcccttgaagaaagacctggggaagttaggaatgagttacatgaacactgggggccaggggagcttccagatagagggaacagtaagtgaagacacccctgtttcaaataggaggcaggccgcatggctggtacagagtgagcatgggagggtaaggggataacagcagagagttagaagggcagggcctggagaggccatcataagacctgaacttctctgccaagtgcaccaagaaacccaggtggaggggccaggaaggcatctgggcatgggcgtctcaagattaggtctgagctaaagatggaaatttgggggtcagcacaagtgtagaaaaaaaggctaagagtttgtaagatggcgccttagggcatcaagtgttcaagtaaaggagaccgtgtggctcagtgaggtgagaggagaaccccatggtctcagaagctgagtgaagacagcatttcaggctgtcccaggagtgggaagctgttcaagaggagctgatggctcagtgcacatcatatttgtacatttcttccaggaaagagaaattgaagatgcagatgcaggagggaaagagaattgcaggaggagggtcccgagtactgagggggtctctcgcccgcactccgtgcctattgacaggagagcaagtagcatatgggtgcagatgcctgtgtgcgtgggttcggtgggcggggggggggggggactttggcaaagacttcttcctgttttctcttcttagtgatgaaataggaagcccctgagatggcggggctggaggtgagggtgcgggtgggcagacaagaggagataaagcagttcagtcgtcgaaaggtgtggtggagtgactccctgcactgtattagagcagtgattctcaaggagtgggccagggtttggggtccccaagattgtttcaggtgttgtgtgaggttagagctatcttcatgatgtattaagaaggtttttcatcttttccactgtcattccctcacaagtagacagtggagcttcccaaggtgtgatctttcagcagcaagcataacaaatgcttgagaatcccgttgtcttttaagcaggacgttgcagaattgttaaaacaatgccattgttgtcactggattttgttttgttttgttttcggaagtatagtgatttttttggtaaaggtatttgtgttaacgtgtaattgatttattatttttgagtgaatatttaaaatttttaaatctcagtagatattacgcgtataaacaaaagttctttggagtcttcagtaactttttagcgtaaaggagttctgaaaccaaacagtttaagaactgctggactacagaaatatgatatgactagcattgttatgggtctcaaaggagaatttgactagaaatcagaagagaacagttgaaaagtagctggttttgaacctgacaaaatagtggctccattaattgactagggaagtgaggggatggagatgggttttcagaatgcagatttgggaatggtgtgctgggatgtgctggtgagctgcccacagcatcggagccaggttgggaggcatccactaagaacacgtgattgaacacataggaatggggatggtggggacagggaggtgggagtgtagaataggagtggggagcaaaaaccgagtggtgggagtgaccacatttagagggtggaataaaggagcaattgtcagggaagacccagacacaggcggggaggatccatggggttggatgctgcagcgggcgagtttgaccttctgtctctgcgagatacatccctagttggtctccagttccattagcaatttattgccacttagaaaacacaagatgtagatttattaacttgaattttaaagaagcaagtagcagttaagtgaaaaaatatgtaaacaccttaatagtggctgtgacagcttattatggctattaggtagattaaatcatctgcctcagccctaaagttggccttaaagttgttgatgaaacatgttttgttttccttgtggcatattactgttagctttagcaggcttatttcaactggttattgtaaacgctgcttactagagacatttctcttgtttctttcagtaacttggatccacttacagaaactgtatccttttttacaaaaaaaaaaaagttgaatgaagatttactgagaataaagaaaacagaaatgaaaggaaaacagaggagtactgaaaagtttaaaaacttgtaggtcaggaaacatcataagcaacactgaaagcaattttaaaaagtgaaactgagaacaagagttgtcttagatctgctgacaaactgttaatatcatgacttggtagaaatctgtaacatcatagctcccctgccaaccttgcccctcaggagtcagcatggctgtattcaccagaaagcacagtgacttcagcaaggtggctgcatagtctccagtgtgaacaaagtctggagataagcagtcccaggcaggtgatgcttccatgaagacaccaacagccaggctctttgcagtttaagcactctacccctcccagggtggccgtaaccttgttccagatgttgccacagcaaacagcatcacagccatgtttccggcagcagaaacagcagagggggaggtgagggtgttcttcccttttaagagtacctttgggcctgtactcccagcactttggggggccaaggcaggcagatcacgaggtcaggcgttcaagaccagcctggccaacatggtgaaaccccgtccgtctctagtaaaaatacaagaactagccagccgtggtggctcactccgtaatcccagctacttaggaggctgaggcaggagaatcgcttgaaccaggacccgggaggcagaggttgcagtgagccgaggttgcagtgagccgagatcgcgccactgcactccagcctgggctacatgtagagcgagactccgtctcaaaaaaaaaaaaaaaaggagagtacctttgggaaatgccacacaggcccgctctgtctcattgaccagcacctgtttcatgcttcacctgtctactgaatcctatctagagtccagaaatgtgccctgctttataaattgggacttgttactaaagtgaaggctttgaggtaacaatgaacagtgtctattattgtcctaatggaaaaatggggcaaagatgtgaagataggatactgtggttatgctgctgtaacagataaccccacatctctagtggcttacaacacaaagttcggattctgtgttatgctctgtatctactgtaggtgggtaggagggttctgctaaccggtaatttatcaaaagagggcatataggagcttaatgaacgtgttaagagttcagtctcatcagtcaaaagacatgtaaactaaaaccaaaatgagatgccatattttatgtatcagccaagattttaaaaaatgataaacctcagtgctgatgatggtgaggtgagaggaacattctcataaattgctagtgacaatataaattgctattatctttccagaaggcactttggaaatagtaattccatttcctgaaagctgaaaataagaagaaatagaggcagtttgtcagtggttgacaaaataaggcccataggccaaatctggcccactgcctgtttttgtaaataaaatgttattgggacaccacgctgattaatttatatttttttctgtggcttttgcagtttgagtagttcagcagggactgtatggcccacaaagcctaggatgttaactatttggccttttacagaaaaagtttgctaacccctgagttataccattacaaacattatttattgcaggagagttactaagcatttggaataagattcacacacaacaatcaggagatggttaagtaaattaagctgtactgaagaaggatttcaaacatttttttgagaaacaggaaatgacccaggtgtccattgtcaggatacaggctatttaaggtgtctcttcacataaagaaatactatacagcagtaaaaattaacttacaggtgcaggcagcaacaggactacatatcagaaacaaaactgaatgggaaaagcaaaaaatctctgcaggttcatctggattttttaaattacgactaatgatatcaccacttttaagatttttgaagaattttgaatgacaaaagtttcactatataggaaggaaggattttaggatgcaaatccgtttatatggtgtgcttccagtgacatttaaaatttgcagtgaaagtcccataatccaggtgagcctatatttgaaagtaacctgttaggtcctagaggtcgatgggagggaggggtgtctgggactcctctgttagccacagaagagatggttgtggtatatgtcagtggctggctggcaggaagactggctgtcctgccatgttaagggttgtatttgaggggtattcaaaataatgatggtccttcagaggagattttgaagaatttcgcacggaacaggttttccaggaacttaaaaaatatatttatgtgtgattgatggtgtcctctgataaattgcatcagaaagtttatactaacaagaaatatattttcatccattaaagtacagagtaaaaagaagaagagaaatgtaggaatgattacatgtcagtaaggatatcccaaggttgaagagtgaagtcatgagcaaattattcaggcatttactgttaacatagttgattccttaagtcagcttttatctgcattactagaaatgcaggatttgaatcagtggagaggaaaaactgggtaattaagttggctctggaaggacttaggttgtaaagttattttcacagtctcatagctgaagtcaaagtaggaactacccattaatttttcagtgcaattatgtaagcatcagtgtattaagcatctactgtgtaccaggcaccagggacagagggaacatgatattcatagactaagaggaggcagaccgcaaacaaacaatatcaggtgataaatggagagacttagatatggtatggtcagtagggaagtagactgtagaactttggggtcctgattctctgctttctattagacagtgctatcaccattccacacttgaggctatatgtccaggcaattttgttaaaaatcagtgataacctaaatatttcatgtaatggtatgtatgattataggactcatacagagctggggataaagtaacagtatactttttaaaggaaactttttttacaatatcccttaatgaagaactttttactgtccattacttttcacactccttaacaggactctagtatgggattcctttctacctacaatacctcgcccactggccagagtatttcattgttgcagaggcacctggtggagaattaatgggttatagtaagtataataccactagtattttgtggagtaggtaaagattttaatatagatttcaactgattgctttagactgcagaattggaatataatgatgcttgtaattttatttcctcttcaacaattcaagaacttactgatctctgttttgggcactgtgctaggcccaggcgataacggcagtgaaccagacagacatggtcttagtcttcttaaatctttcattctaaaaaaaaaaaaaatctttcattctaaggccaggtacagtggctcacgcctgtaatcccaacactttggaaggccaaggcaggcagatcctttgaggtcaggagttcaagatcggcctggccaaatggtgaaagcctgcctctactaaaaatacaaaaaattagctgggcgtggtatcgcgtgcctataatcccagctactcaggaagctgaggcgggagaatcacttgaaccccggaggcagaacttgcagtgggctgagatcatgccactgcactccagcctgggtgacacagtgagactctgtctcaaaaaaaaaaaaaaaatctttcattctatacttttgttaaatttctacatggtttatttagtacataatgcaggcatcatagcatcctcattgaattagcattactaacagaacctttagctctgaactatatgtgtacatccacatgtacccacatatacccacacccatatgaaatgcagatatttgaaaaaatacatactctggttttttttttttcaaaattagttgtgttttaagtatatcgttcttttttgttctaattctgattttagaactattctaaatgtaacagatagtgttacatttacaagtgaatttcaaataaaagcactaactgttagctggatgacctcaggtggtacttaaaaacttctttattagtttcctttgtaataaaaacatactgaacagtaattctatatttatgtgtaaatcaatgtctagttactgaatgtgatttttgttgttgttggcagttatgggtaaagcagaaggctcagtagctagggaagaatggcacgggcacgtcacagctctgtctgttgccccagaatttcgacgccttggtttggctgctaaacttatggagttactagaggagatttcagaaaggtgagattcagtttttcaaatacacttagtgatttgtggacccctaaccattttcttccccttcaggctgaataactgtcatgctttacagttcacaggaatttcatcttccatctccagtagtccttagaacaattctatcacatagtcaaagtgatattgtttctattttgccattgaggaaattaaggcaaagtgttgtagtgacccgctataggcctataagctgaggaattggtgcaattcagttccaaaggctagctctcgaggtttctcttagtgttcctgccacagtggcacacattcctaaaatctgttaccattgctttggcatctgaataaatttttagcagtgctcctcggccaaaagaaaatagttcagtcttaagcagttatattctaactgtttaataagtatttatagcctaacagctaatagccatttagaaaaaaaataaattgaaagaagaaatattttcatttcattcttaaataactgtggctagctaccaatgagaggtgtgcacctgttggacattaaatgacttggcagaaccacttgcattcctgtttcatattgattttcatctagtatttttttttaatcacagcaactgccagaaactcagcttcatagaaatattatgtcattaagaggaatgtagcatgatcttacgttgaatttgtgaactacttcaaactagtttgccaatatctgacatgtaaggttttgctgttttccctgaacattcgaaatatcctttggtggctgtatgagtttgggacaccttagggcacctgagtgcacagtttgcgaactgccagcatggcatttttttttttttttttaagggacgtgttgtatatatcaaacctcttcattactggagataaaagaaatacaataaatagaagagaaggcccctcctcgtatcttcattctagaagagagatgtttgtagtagcttcacctgttgtcaagctgccatttctttctccactgtaatttcctaaaagtgtggtaggaaagagaatagttgctgagaagggttcttgagcttaatttctacttaattattagatttaataaaggcaagttttaaagaagtatctgtggcctgacaaagacttcaagccaaattagaggcaaaggagctcaaactcattcagagaagaaattgtgttagctgaaaaagaagtcggtgctaatctttaagattttttaaagttctctctagaccaaacaaagaagggaagaaaattttagcatgattatagtttacacacatttattaatggcattatgttgaaaaaaagtatttggcattattgtatagtgaacagggagttagaaagtgggttgttcaatgagaacacatggacacagggaggggaacatcacacaccagggcctgtcgggggtgggggtctaagggagggatagaattaggataaatacctaatgtagatgacgagttgatgggtgcagcaaaccaccatggcacgcgtatacctatgtaacaaacctgcacgttctgcacatgtatcccagaacttaaagtataataataataaaaaaaagcaggtcgtaactagctatgaccttgcacatataatttagggtatttgtatgatagattctccctctgagtagaagaccactaagctctcttcccttccagtttctaagccttcattattttagactagttgctaagatttaagtaatcttcatttgtaggcatatatatacatatacacatacatgatacatatacatatgcttatatacactatatacatgtatacatagtgcatacaatgtatacattaaaaatagaaaccaaacaagtagaggagaagaaaaattgaatgatagaagtcaactccaaagaagagaaaaaggaaattaaaccagcaaaacaaaatgcatgaaataaaatggtagcccagaatccaaatattgtcagtaattacaacagtaaacgttaatggacttaggactttatttatttattattagttttggagatggggtcttgctctgttgctcaggctggagtgcagtggcgtgatctcagctcactgcaacgtctgcctcccaggctcaaatgattttcctctctcaccctctgagtagctgggattacaggcgcccaccaccatgcacggccagctatgatgactctatttaaaagacaaaggctgtctgtattgtttacaggaaatatgtgtaaaatatattaaaatatttttaatacagaaagattgaaagtaaatttttaaattaccttgcaaattctaaccaaaagaaagttagaatacttattaataatagttatagttgaataattattaccagcataaaaaagggtcactgcatattgataaaatatttaatcaaggaagtaacaagtctgggagtggtggctcatgactgtaatcccagcaccttgggaggccgagacaggtggatcacttgaggtcaggagttccagaccagtctggccaacatggtgaaatcccgtctcgactaaaaatacaaaaattagccgggtgtggtagcacgtgactgtaatcccagctactcgggaggctgaggcaggagaattgcttgaacctgggaggcgaagattacagtgagccaagatcacgccattgcactccagcctgtgcaacagagcgagactccatctcaaaaaaaaaaaaaaaaatagcgatttaaaatggtatataccaagtgacatcatttcaaagtaaaaatgcacaaattgacaaaactacaaggagaaatagacaaattattattataatgggagatttagacatgcttttttctaattgatagaacaatgagatagaaatttgtcaagcctatagaacaagaatcagcaattttcttctgggtcagatagtaaatattcaggcattacaggccacctaaagtcttggttacatagttttttgttttgttttgttttgttttgtttttaacaaccattgcaaaaaccattcttagcttgaaggcagtagcaaaataggttataagccaacccctgccctaaagaatttcaatcagtagcccaaaatcttttcacgaagaaagctgtggcttctctggccaattttactaaacatttaagaaataatgactgaaaggtcacttttacacaaactattttgcacaagccaaaaaagggaacattcctcaacttattttttaaggccaggataaccttgataacaatacttggcaaaatatgggaaaggaaaattcgaggaacatctcactcagatgcaaaatctcggaaaaataattagcaaagtggatttggcactacataaataggatgacacatcaggaacaaggtggtttcaactttacactaaaggagaacactggttattttagaaagtgcagcaaacttgataaaatccaatattccttcctgataaaaactgttagcaaactgggaaatagaaagggggaacttccttaacctgaaaaatatctacaagaaatttgtagtaaatatatttagtagtgatacactgaatgctttccttttgaaattagggacaagttagtcccgcttcagtaatttactagaaattatagcacaggaaagcaggaaaaaataaacgataggaggattgagaggaaacaaaacttattttgcacagatatgattatataaatataaaatccataagaatataaatatttagaattaataaaaggcaaagttgttggatataaagtcagtataaaaatcaattgtatttacatatgagaggaaacaaaacttacttattttgcacagatatgattatacaaatataaaatccacaagaatctagaaataaatgtttagaattaataaaaggtaggcaaggttgttggatagaaagtcagtataaaaatcaattgtatttatatatatataaacagtaaaatttagaaaaagatgccatagcatgaaaaaacattaagtacttaagaatctagcaagtgctatgcaagacctctctgacatttaaaaaacttttttgagagatattaaagtagccctgataagtggagcgataaactatcactggattagaggatacagtaaacaggtaatcgaccgcagttccaatgtaattgcagtcaaaatcccaagcattttttatagtacttgttaagctgactctgaaacatacagaggaacagaaagagcaaaaaagagacaagatattcttgaacaacaacaaaaatgggtgatgtgcccctccaggtatcagactgtaaagagtgagactatatcttagtgctgtagttatctagaccagtgttacagaatttgagaaacagacccaagaatatatggactttaacataccacagaagaggcattgcacatcaatagtatgaagatagacttttcagtaaaggtggttggacaattggatgtccctatgggaaaaaaaaatttcccagattaccattattccatacacaaatcaactccagatttattaaaaacctagatgtgaaaccaaaactaagaagtcttttgaatataatatggcagagtgtctctgtggcctcagtgtagaactttttaaaaaggccataaaaaggctaaggaaaggattcatatattcagcttcactgaagtgaagtaactttttatcaaaagataacataaggataatgacaagacaaaccacaaattggaaaaagatacttgcagacattacacagtattgaatattcacaatacatagagaactgtagcgggggaaaaattgtatgaaagatttaagtactatacagaaggagaaatctaaatggccaaccaacagaaatatattcagcattgttagtaattggaaatacaaattaaaatctgagatatagttacactgtaagattggcaaaaataaaaacatgtgatgcaccaagccttgttgctgtggaatggaggcttactcacttctgtgcaagagtaagttggtacaagccagttggaaaaacagtttggtattaactaatgaagatgtgccctgtgacacaacagtgagactcctagctatagaccttacgtgagacactcaacagaagtattcacaggagcatcgtttgtatagtaaaagccagaaacgtatcaacaggaccgtgaatgacttgtgcacaagcccagccactcttgaagctgactcttacaatgttagtcgactgagagaagcaaaagacaaaagaatatatgattccatgtatataaacttcataaacaggagaaactgtaataggtggtgaatttgtagaacaaatgccttgagtttatcttttaagaaaacgtgttgcttttgaaatactagcatgcaaacataaagtcatgttcttacactgcaaagtaattgtcataaatcctaagtaatacaaatttctattaccatgtaatcagctacaaggtcctattactaccattctgagtagtagtcaaagcaaggtaaaaacacgttttaaaaaaaatatgtatctattactttctagggtttctcacattctaacattttccttttttgtttttcttttaaagaaagggtggattttttgtggatctctttgtaagagtatctaaccaagttgcagttaacatgtacaagcagttgggctacagtgtatataggacggtcatagagtactattcggccagcaacggggagcctgatgaggacgcttatggtaagctcccttccatggcagtatccccaagaagtcgaaacagttacattctttctacagattgtagtatttgattattttaataaatgtagaatatttgactttaaaatttaaatttccctcaacctacctttatcaacctattagtagtagtaattaacttacctattaactaaccaatggttaatttctgtaccttactgtttcactctgttacatacatattattttgctaacaagaaaacgtgtattgtgagctgaatactgggtgaggtctggttagcatctggtacacttggcaattgggagacatttataaatacattttgcttagaatatggtgaagtgggggtagggataaaacctcttatgggaactttacctatacactttacatttgatataatacattttttgggtgtttatattaaactttgcttctttacagatatgaggaaagcactttccagggatactgagaagaaatccatcataccattacctcatcctgtgaggcctgaagacattgaataaccctgggcagtggttcttaggcagatactctagatgctttatggacaatattattttcattggatgattctggagctctattaggagaaaagtaatcattttaggtcttaaagacttcaagaaaatacaggttatcaatttattttaaatctcattgtttccagttagcaatatcatacctattaaagctgttcattgtaacaaaattcaatcaaaaaggcagctaggtcagaaggaaacataccactctcatggttcatagtattcactgtatgtatgctagggaaaagacttgctccagtctcctcctcagttctgtgcctgagaaccactgctgcatatatttgtttttaaattttgtattgaactgttaattgaagctttaaaagcatatatgaaatgtataaatctaagatgtataatacattattgactctatgaatgttttctgaagtttgttagtcatttgtaaaactaaatcagattgtaatcccagtactttgggaggccaaggcaggctgattgcttgaggtcaggagtttgagaccagcctggccaaaatctatactaaaaaaaatacaaaaattagctgggcatcccagctatgcagaagctgaagcacaagaattgcttgaaccctggaggtggaggttgcagtgagctgagatcgtcccactgcactccagcccgggcaacagagtaagaccctgcctcaagaaaaaaaaaaaaaaaaaaaatcaggattgtgaaaggtcatcatcatttaagatacgtttaattaaattgtgacttccatacgtagtattttaaaaatgcacacttgaagcaatcactgtccagcatacttaagaagctcccttcttatcgtgtagtaaattcttcccagtcacctgcgttcataccattatactgtttgtttgttagtcctagatcttttctcctcttcacaatgctttgcttaaatcctgcccttctaaaaagccaaaaaaaaaaaaaaaaaacttgaggttttttttttttttggagagggaaaagaacataattcctaaagaaaggccatataactatatcataggccaaccatgtattttatgtgtagtgtcttcctctgtaatatgtgaaaatatccagttagttagttagtgaaagacttaacgaaagaaaaacccacaagaaattattaaacttttactatcgaaaggatttactttggtggagttgagggtgggagagaaatgaatctttatgttctcctgttagagaatagcttttttccttccagctttcacactggcacatgcttattacaattctaccttgggaacatgacagaatttttttcttatgcattcatgcaacataaacagataattctaggaagactgtgattaagtcacttgcattctgacctattattttcatctctccctgactctgggtgagccaaaggctattaagatgatgttctcctgctcactcactaggcagacctctactcgagaagtgatctgacaccgcagtagctgatgctcgtccagtgactaaagcagtcaggctgaaaacagattttatctcaacaacagtcctagtttcttctgtcctcaaacactgttatttattttcaagataaaatttagtaacaacattacgaagtagcttttattcccttgggtgaataagatgtgcacatttaataataaatttgcttactaaaggtccttttaggggaaaacaaccttaaaaatacagttctagtccttgggcagtgaacaaagaaaaaatgtgcttgagaaacacagtccaggttaaaggaaaactctcagatcggttaatgcagttgaatttttgcttgagaatgtgagcaacgtatcagcaaatacattcattcttgtgctactcttcattatttagcatagagctaccttaggtgtttctacacatgctctaaaccaagagtaagtttaacatgtcagcagtgaggagtagacattttctactatagcacactgggagatgtttactggtactctaggtagaaatgactccattgtccactaagtttgggaaataaataatatggcaacattgctactggagatacataatgtacagaagcctaactataaagagatttgattaacgagacttaagtcttagtccagaatttcccaaatttatgtgaacatgggacatcatttttcatagcacacacgtgaacaagccattattctttaaacaaggtattacaaactcaaccactctggagaactgatgagcgcctaactgaaattattagactaaattcttagtaaacaatgttttctgaaccttgttcagaaatataatcactgcaaattattttccaagtgttgttctaaaaaacaatataactggacactagtaagaaagtaaggtaaattattaatccactcgcattcaattctacaaggaatgaaaccatttttaaaagtggcttagaacaaacaatttactgagcacttactatgcacccaccaggtatattccttttataatgtaatcttcaaaatgagctgtcaaactattggcccattttgtgaatgaggaaaatgaaaattaagttatataatcatgagtggcagagctgggaaatgaactcaagtctgtgactctgaagacatgaaaaagttacacatttcagatgaatgcataaactatctttatgggtatgacatgaaaagtaactgtagaatgttaccttaattacatttcctaatgcatgatgtggacagacattagaaaagtttggactcagttggaaaaacaaatccagcagttaaaaaagtcctttacttgcaatccctacccctagctaacccaagagcatttaaaaaataacttaaaaagtagccatcaaagataccaatcaatttcttactggtgaaatatataagaacttccaggagtcacaagagttccaaacaattaatttataaaaataacaaaacatttgtctatgaaaaaaagatcaggattcactctcatcgacgtcctcatctggatggtgctcagcatcctccttttcctgctgctgtttcttccacagtttggccatggccaggagtttgaggttaggttggttggcagcatcttctggaaagatgtaatcaaagtattcttcccagcctgcatcagactacagaaataaaaaatgaaaagataagcaaacgtgggtgatatactcacatatcagagtgaagaatttttactggaaatccggatgattacctccattttacaaaataacatcaaagtctactacagaaagaacaagggctgggtctgaaagactgggagtgagtaagcagcaactgtagctcagtgagaactaaactggtagaaaaacattctaaaaatctaagcacagctcctctatagccaaccaagatgttcagtgtctccaactacattgtgcagtcttacacttaagaaaacgtttaacgatctttacataatattcacccagtagcaaaagccatacatctgtgcattattattccaactccctaccttcccatcctcacctcctatcagtcactgatttcacttcccaaatattgttctaacaggccctgtggccctgttctagttccagcttccatgtcttgctcagcttataaaaactgcttcctgatgggtcttctttctccaatctaagccccttgagtctgccaggatgagaggctagcaatctggtcacgtcattttatgcaaaacagccttcactgactcccaccaaactccttcttaccgcctacaagccttctctggataggctcctatctgaaagttcagttccatcttcctccacacttacttcctattaaatgctctaaaaatatcacacttcatgaagttcccagactcaaccatcaccaaaacacctttgccaaccccttcccgttctccacctctgactggaccatatgttctaccccgtgtttccataacagccagattgcaaccatctcctactccaggtggtctgcttccattctaagattgtacatatgccacttaaaagtccacatttcgacgtcagaagtgtttctactcatgtgacgtgagatgaacagtcccagggcagagttcttaccccatcatcagtctggacctttcttctcttcttgactttctctggcatgagtttgtctactctctccttatctgaagctgttccaaattcttcttcaaaacttcgccaagattccagcagcataagtctctcttccttttcttcacagtttcgcatggttttgttagcttcttcataaatttgtctgcatttagtcaaacttccttcttttcctgaagacaactcaaactgagcaaagctgatccatacctttaaaaaaagttattattgaaccaaattaaccatatcactcagaagataataatgtagtaataataaagcgaattcccagttaatgacatcggaaagtaatgtgtgcatcactaatgtttcacagatgaaaacaatgaatatatgcttcaatataaacactgaaaatatttgattctacattctacaattaaatgtctgacatagtcttaaactcttgaaaagagtttaacttggctgggtgcagtggctcacgcctgtaatcccagcacttcgggaggctgaggtgggcagatcacgaggtcaagagatcgagaccatcctggccaacaggtgaaaccctgtctctattaaaaatagaaaaattagcctgggcattatggtgcgcgtctctagtcccagctactctggaggctgaggcaggagaattgcttgaacctgggaggcggaggttgcagtgagccgagataacgccactgcactccagcctagagacacagcaagactccgtctcaaaaaaaaaaaaaatagtttaactttttttcaatcttgtgatacccaagctactcacatgcagcataaacaatgacctggtataaacttaacattccaaacattccaaagtcctctgagactcacgtttctcttgaaaagcaaggaagtcattaaaaaaaaaaaaaaaacaaaaacccaaacacttaaaatacagaaatatatcattttcttctggactgctgattcaagcaaaatgaaagatcatctacaaagcaaggataccttgacatgctgcgtccgttgaagcaaccgccggtaaaggtttcgtgttctttctgtttcttcctgctcaatttcaaaatcaatatatgatttccaaagcacctaaggaagaaaagtaaatgggtcagtcttgacatttacaaagcagcatgcccccatccaaagcacagctgaagtatcactctaacctacatctaggaacataggatttttactgaacaactaaagaacacatgtggataagataaataacattggtatctataagctggccaaaacttggctagaattccagattacagaaaaagggccttggattcagtcttagagattctctttggaagtttttcaaatgcttgacttatcaagagctgagaaacttgccaagcatctcccaggtactccatattctagccacacgcaattgagcgtccagagagaaaacaggcccaggttagccagtatgcatgttcttacctctactgtacattccttgttattatgagagttcagtgcaacaagcattcactgaacaggtgcgcactggctcggtgcagcctggcagggaataaggatgaataaaccgtggcatggacacctgaaagctggcagtctggtggaggagccgaggacaactgatgaactcagtgatacccaaagccctgccttaattaatgcaatcagggggccaaaccattaaatgcagggtcatgttagtgcatgagattaacaaaacggctgggtgagttctacgactcatgtgagattcaaatctttcctagctgtggtttggtgctaccttgtgggtcaagcttaactactgaaggcaggcgaggactttcaggacagtgacaacagaagttgcaaggacatcctggtttagagaatacagggatgtgcagttcctacctccatccccctcgttctccgggtgggccagcctgctggcttcttccttgcctggcctcttccccagcccctttaggctttcctgctgcagaaggggcgtcacccacccccatgatatcccagttcatcctgggcatcatcctggatgtctactgctctggtatctaatgagagggctacttcccctgtcccccacagccacctttccacgtacaagcctaatctgagtagaagagactaagttagttagatcatcgttatactctaaaatacacccacatttagatggtcatctaaagtaagactaaacacgtatctcaaacaaaattatatttgacttgagatgctcacctctggcatgtctaaacgtggctgactgatggctaattcatagattgcccgtgctctgtcaatatcaccaaggattgtctctaattcagcgaatttaatccatgaggtacaattttcaggtccaaattccaggaacttttcataaagcttccggcatctgtcaaattctcgaagctgtagctccaattctatgtaaactttaaataatttgttctttggacatttgcctatggaagttccctggaaaataaaataaccagaccactgtgatactgtagtggatttaatctgtgcagttattgcactgccctagaggctgttctctgctgaggaagaatcttgcaaagtcaacatggcctaccattctttccctctgtggtatcacaatgtttactggttcttgacaaaaggctgaaggaaactcctctaattcactcagcaagaggcagtgttccagaattgtttgggcaactaaataaaataagatttgaaagtttctcaggatctcctagggaatagggatgtcaaatgcataaaacctcctataaataaaaaggacaaggcatggtggctcatgcctgtaatcccagcattctgagaggccaacatgggaggatcatttccgcccaggaggcagaggttgcagtgagccaagatcgcgctactgcattccagcttggggaacagagcgagaccctgtctcaaaaaaaaaccaaacaaacaaaaaaaaaaaaaagaaaaaaaaagtggaacaattaaaagtgcatttaacacaccaaaaagtttgcacaggatcagattactaattccagtctgtggaaagatttagtaactggtagctatagaagtttccaatattgaaacagaatgttaatttgccccaggtaataagaataatttacgcattattagtcagtgtttttacagaggacgcatgttttctaacatgtcccaggctataaaggtataatacttctgtcactctttaaagtaggaactgtacaacttccaagcaccaagattttaatttctttctcatagaacttgatgagacatcttgatcctttctttacttaccaatgctcttctggctaatgacagattcttctgtcgtatttcaaactgtgcatacagtatccacattttggcaaatgtgaactagaaaacaaaagcacaaaaatatctagcttaaaagcctcatccaaattaaattgaattaaaattaatttaaattaaccaaagccattggtaattcgatttctctaaaacttcagagtaagaggaatgtactctgcttatttacaagcaaagaccacattcatttcacaaaagttagaaacccacataccatgatccagatactatattgtactgcatggcatggtaacctctcctgagaaccatgatccagatactgtactgtactgtatggcacggtagcctctgctcagaacagactttgttttgtaggcatgcttgtatatgggcagaatgtcctacctctattctgaaaagtaactcagtcaacacttctacagaaggaaacacgttttgtttctcgtgctgggaaacaaggcggaggtaacatctcaaccatctacacaaggggcacattcatctgtgcatgcacacactcactgttaccaacaaacccgcctgtgtgtcccccgcacacgttgtgtgctctctgcatggatgtctttctccttccactcagactattcacattacctagccttctctgaatttatattatttgtttgtcaatgcaggttgtcctccaacctagtctgtgagctgttttcagaggcaaggagcatatctcagtcttatttatgttgtccatggtgggacagggaagcattttatcaatcaatattatttcactgaattacttcacaagtaacagaagaggattctgacctgtttgaaatggaacactttagagcaaacatacctttttgtgaggaattagttccaaagaggcttgatacacctgtcttgtcctctcaggatcctgtattaggataagaaattttcacaaaatattgaagtctgctgctaacactcattttactagttactaattttactgatattggtaaaaatgtacacccccaaaacagcatgtttcacaagttgttacttgcaaaccctgatttatgatctaaagtatgaacggccatgaaacttcagtttaagaatcaccaacaagatagccaccaaacttctaagcccttctttgtagaaagccgttttgcctgatggcagaaagaaacaaagatgtttcatagtctcagatcaaacccagaaggttaatacaaatgatttctgaaaatgccacttgatttttgctaaaagcaaaaatgcataatctagccagaattactcctattaatgagcaaatccaggaaactatatttcactaaattaagggctggttcactgttctctttcaagctccaagtgatatcttgttgtgcctcaagtaaaaatcaaaccaaagttaaaaaagcccctcacgtgtggccacaacaagcacagagggtttaaaatgttgcagagcgaatatataactgtatggatgaacagaagcctataaaaatttaaaactaaatttccttctttcaagaattacaaacatccacaataggtgagctgtgaatacagaagacaggaaaccattatcagctgacacataattctgttttttcacctttgcctccaattcttcatagagtgcatagttgatccaaagataaatgtagcgcttccagtgcctcttctcctgaatgggtgggacattggcaatggccctttcatagacttctctcacggcttcagcttctgcgtcactttctaccaagcgcaagtaatcaaaccatgcatcataattgtgtggattcgcctagaaagacaaccagtttaataaataaaaaacaaaaccaagagctgcacttgccaggttaagcaagctgaaaaaaggcatcaggctgactttctatattttagcaccttttcttctaaatgttacatgttctttcattttaaaaacaccatccctgagactgcataaatagaaaagaaacaggaatacagaggatagattactggccaggtgtcccacagcaaggactccttcatctatagccatcactctcacgacagtcaataattagatgcctattcttgccaatgcatttgcttaaatatgtgactatgtatcattatgtctgtaacaacagaatcgtatcatgctcacaattgttaaacttgcctttccaattaatagcaattcatctttaacatatcttgctaacctaccaccacatttaataacagacttagtcctttgcttggaggtatcttaattaacttgactaaggaagagtatttttaaatacacaacagaatactgaaggaaaatgacactctctttgaattgaaatcaaaatagtacattacagaaaaagagatgccgatggaaccctgtctagcatacatcttttgttcaggcagttaagctcaaaggtgatgtgcaaaacaggtttttggaccaatctctgactcttccaccttcttccaacaatgagctcgaatggattccacatttcttttgctccagttctacatacagtcaacaatcaacaaaacgacttacaacatgtaagtggcagagcaaatccaagtgttgtttgcttgccttttctatcagccttgtttattcctacttgtctgaaatagctgccaattggatcacgggcacatcatcacgagagtaatcactagtagtgctacttgctattattcattttagtgttgctagtattgatgagcacatcttgggttatctgcagagttgaccatccacaccagtgctcaccttcacttcttcttcgtactggaatctccgtttgctcacaatgatatcttcaataccccgcctatcaccaaacttcttctcaaagatggtataatttttaaagagttcttgggcatcttgttttgaaattctgtccagggcatacttgtaaatcactcgtaccctttcaaactaaatgcagacaggatgattaccttctataacacaatattctcatgccagtcacaactaggagagtaaatataacaaaatattacttataagttagattttgaggcctcataatatccagagtaagatgcttttctccctcttgttgaaggttatctctgtcaggatggaccggtactctgctttgagctccatatttaatactgtctacctaacactgccaactggatgtctactgcacatctcaaacaggtccaaaactgagcttctgtttcctccccactcaaactgggactctccccatcttcccaattttagtaggcaaggcctaacctacagtcacttgctcaagccaaaaccttcaggtgatcctcaattcctcttttttcctcatactccatattcactcttgcaacatgccctaccatttcaatctcttccacacagccatttgcttctccccagcccccagccatcaaactccactgttcacctggcccacttcaaaagtctccccactggtctcccctggttccacttttgccatctaccctcatacattctccatgaattagccagaggctctccttaaaatataaatcatatccaatcactgtcccgcttaaaacctttcaatgcttcccactggcccgaacagaatctgaactccctagcatggtccgtgcaagaccttatataggttgagtatctcttgtctgaagcatttggtatcagaagtgttttggatttgggatgtttccccagtttgggaatatttgcattatacttactggttcagcatccctaatccaaaaacccgaagtctgaaatgttccaatgaacatttccttcgagtgtcatgtcagcactcaacaagtttcacattttgagttttggattttcagactgggaatgctcaaacctgtatttggatggatctcaattctgtattatttgaactccctttttttttaagaaatggggtcctgctctgtcacccaggctagagtgcaatggcacgaacatagctcattgtagtctcaaactcctaggctcaagtgatactcctgcctcagcttcccaagtagctgggactgtaggtgtgcaccactatgcccactcaatttttttttttagagacagggtctcactatgttgcccaggctggtctcaaactcctggcctcaagtgatccttctgcctcatcttctcaatatttgagctattttcataggtacaagggaaaaaaagaactctcttatttgtagggcaatctctgtttccattctaaatgttttctgttctagggctttaagctttttgtttcccatatttattatcggttaagtcctttacttaggatgccaaaagactagttctcagtttacgggcattcagactaaaaggcttaattttcaaacaaagcacaataaaattaagacagttataatacaatctataatcagctcccatctgtagcttagtcacatatatatgctgttctctgtgagaagctgtgtttttgtattttgaaaacatctttccagggatatgtcagtaagaaaaaatggaaatgaactcaccatgcacaaaatgtaatctttgctaagctgttttacagtataatgaagttaggtatacttacctctttctgattttcttcaaacttggcaaaggcaacataaaggtgctcatccatatgttcatctccaaagaattccacagctctctcatacactttccgtgcatgggcaaaataagcatgtttttcttcaaagcgggcatacttgatccagttcttaacatcagggtgcacgaggacaagtgcaagggaattaaggaaatcccaggcaaaacagcatggcttaaaaaaatagtaagtaagtaaacaccaaaaccataccaaagcctggaaactccaaaaattcaaactacaactctaggggaacaaaacacatacaaaagtgtagaattaaacagtggcttctgtgagagcagggccacgcctgttcatctctattttcctccagtgcttagttaagattttagtggtgggtataaactcgagttggaagcaaagaaaaatctcaacccaggttaccaaccatgtgatcttggataagtcactgaacttagacgtctaagtctcagctgtttcatttgtaaacagggaaaaataatgccagcctcactggattactgccagctttaaatgagaaaatgtatgtaaagcccttagcacagtttctagccaaaagaacatggcaccgtaagcggtcaataatggtctggtcattaaatagcaccaattatattaaaatatgaatacttgaactaataattaagaaaaaaacatgctataaaaagaaaactgttaactagagtcaaagcagaaagttttgaattgtcattttaatctatcttccttgaataaatcattaatttccaaagtagtaatatattccaatatggcaaagaagagcatcagttctgaagctgctctactaggttcacattctatttccatcagcacctgtgagaacccagtcaagctacttaatctctcatgcctcagctccctcatctgtaggacagagaagttcctacactgcaaggatgttatgaggattaaacaacaatatctgtaaagtacttagaatactgcctggcacgtagcaagtgctataaaagctttcgtcaaactaataatattaaaattagtagacataattaagatcttaacattgtcacctcaacagagaagagtaaaaaaataaaaagatcttaatactgcataataaagttgactctcattatttctggtagttatgttctatttagtcaatgcgaacacttaattattgagtactgaaccactgctcctaggagaaacgtgtatatatacaatctcacattcatcatcatcttaaatcctaaaaagaactcatcctggcagattctatcttcattattttgtaagaaaagtggttcagaaatgttaagtgactggactgaggctgccccactgacagggattcaaactccccgactggccccagagccacagctccttgcactacatggcactggcccttcctgtctccaagctctaggcatggttatatgaggttaagaccagaaggcaagcctcaccttgttggacttcatgctctgtgcatgtccacaaatgactgtgaaagtgccacaattactgattttgggggttacaaataaattttagcaaatacgtgattttgcaaacatggaatctgcaaatagtgaggaatgactgtacttcagtttctaaaagtgctttcatgtgtatcatttaatcttcgcaacagcccaacaaaggtgtttttattcttgtttttaagaagaggacaccaactctcaaaggagttaaatgactctctggagccacacagctagtaaacagtaaaccttggatgaactccagtaaggtagtaatgaccaacacaaaccttagaaaaacaggactggcaatggcagccaggaccttagtacagttagtcctccagccatgggttccatatctgtggattcaaccaacctgagataaagtattcgtgagaaaaaagtgcttctgtattgaacatgtcgtttttttgcttattattccttaaaatatacagaataacaattatttatataacatttacattgcattaggtataagtaatctagagattatttgaattatatgggaggctatgcataggttacatgcaaatactacatcattttatatgagggacttaagcatcaccgattttggtatccccttgagttcctggaaacaatcccccaggaatatcattttccacaaggaaacattagcttttagcattacaataaaataaacccaaactctcactagaaaagactagttacccagaatacaaattttcattctgaccaatctctttccctacaaaacatagggaagctgataaactggcattcttgactttgagcctgacattaatgactgtgtgtcctgatcatgagacatctctacaggagcagcagcagcatccaggacaatcatggcaccatacagatctcgtccaaaggatatatcgctcataaatggtgcgggcccgatccacctctttgtatctcagctcaaagttgatgtaggagtgccaggcttgctcctcaggctgccactccatccagcgctcaaacacctgccgggcaccggcaacgtttcccaacatttcctccatgtacgtgtacttgtacctgtaacaaaatcacccgaaaatatctgctgtggtttagttcttccattgttgaatgggaagaagattgaagattttacctttcttaaaggttaaatcaaacatgttttgtcatttgtatgtaaatctgaaaaaggatgaaccattggaaaaaaagatttttttttcttaaaagttgcctagttcaacaagaagcttatgaataaaagattgcaatcaaaattttagttttgattacatagctatagaacattacgattatgacttaatagactatgggacataacagcatttatgtctgaagaaaaagtaggatatcaaattaaactatcatcatgtaaataaaataaatacagaagatgtggaactttgctagtctataaaaggctgttttgttagatcagaaacttaccagaactgattaactcgaggcagcgttgttatggcccggtcccagatatttcgagcatggttgacttggcgattcttcatttccatttctgcgtatttcagccagagtgtaatatttcggtagtctacatctaaagcacgctcgtatatggatcgagcccttaagaagcaagatttgcagggcatcaaaaatagagcattcaacacatgtagcagttatttcaaactatctggaatgcactgatgttttattaggtgtctaccatgagccaagttctgggcataaaaaaatgaaaagatataatgctctcaagtaccttacaaagtcttataaaaagacatgcatgcaattataatgcaatgtgatttatgttatagtcaagatctgcacgggaaacagagaggaagaaatgaaaatgtttggtggaaaaggctaagtagtaggtaattgtagaaatgagaacttgaggaacgttccgatttaccaggaaactaagtttggtgaggagggggtgctcattccaggcaaggagaacagtcaagcctcacgataaggagacatgatatattcagggagtggcacatacacaggcacagtgggggaaggaggtatgcggggagaatgcagaaagctagaccacaggaagggccagattgcaatttttattttttttggccattggttttattttttttggccattgtttagctgaaatttgtaaaaatctcaatatatacaaagcaaatgaaattgtgcttctttagctacaactgacaagatctatctctaaagcctcttctgccaccctccccaggactattctaccccagtactcctgaggccctcaagggaaccctagggttccatggaaccaaagttgaaaatttctacccgaggcacaatcttttacctgtgctttaactttttcttcttttctttttggtatctgttaatctatgaatcattatatacaaaactacactctcagtaattttacctttgaatctcctttaggctttcttcccattgtgcgtattttatccagttactaatcacagtcctgttttttcttatattatcttcaaaagtctggaagaaggcaaaaagggtcaagtcaaaagacaaatgactaaaaatgacagcacccttggtctattttaagtcttgtactaaaatggttattcattttgttcatatttaagagaaattacatcctggaatccttgaggaataagaaacccactacagaaggttacagtcaactaactgatactttaaaatggtctatgcttgtccctaataaaaaatgtttttgactattacctttaagtcctctggtaattctcagaatttcatatataacagcattagtgctttaaaacagtcccacattctagagtgaagaggtcaaatcagatcccaaagtcttctcatggtccttttgcagacctcaattccttttcctttctttctttctttctttttttttttttgagacaaagtcttgctctgtcgcccaggctggagtgcagtggcacgatctcggctcactgcagcctctgcctcccgagttgctgtgattctcatgtctcagcctcccgaatagctgggattacaggcacctgccaccacgcctggctaatttttgtattttagtagagatggggtttcaccatgttggctaggctggtctcaaactcctgacctcaggtgatctgcccgcctcggcctcccaaagtgttgggattacaggcgcgagccactgtgcccagccagatctcaattcttaacacagaaggtggtatagacagaagtacacagtgcagccttactaagcataccctccttcttgttgtcagttgttccatctgctaaacttccgctcactttgattcagcatcaaaaattatgcagattcaatttctttacactttaaccagacaactcatggcatattttatatagttcagaaaaatgctgttatctggtaaccagaagtacattattcatgcgtctggaaacacttaacctcatcttgccctacagaatccaaccaatgaggagcttttcaaactgaccgatacagtcttaacaattagtggactgaaagataccacactgactgaccttccttttccttagtttataatcatttaattcttcttcatctgtgatcttctgttgaggtggaggtggaagaagctcaagttctctttctttagcctctcttaagagttgttcagcagttatctgtacctcagccggggctttgtttttcaccttttaagaaagaagacatttctatttttagtagttgctcttcacacaaggcttaagaaacaaacatacattttttaggatatgaactttgttagtattatcacaagatgccctttttgtatgacatgttcccattcctccatgagactgaaaagaaaaaaaaaataccgttttctctcttattcatagtatctactgcaaagccataggtaaaagtctcaagagaaaaaggtggcaaaaataatagcaagttttcccttttagatgagtataataataaactttgaggccgtctaggtaaaattctgaccagaggttttgttttatcaaaatgtgtagcacatcttattaacagcattacaacctgcatttacagaattcttcaacttatttaatgccccggtgtataactgggtttggttttacatggcacttcaagtcaaaggcaatttcagtaagttctcatcattagactgtaagcttcttgaggtcttagaagcttacagtctaacgtagcttagagctgtgctgtccaacacagtagctatgagtcacatgtggtgagtacaaattgaggtggactgtaagtgtaaaatacacattggttttgaagatgaagtataaaaaagaataaactacctcattacattttttataccgattacatgttgaaatgataatattttggatacattagctcaaataaaatatatattatcaaaattaatttcacttttttgctttgtttttactttttaatgtagatatgagaaaatttaaaatttcatatgtggtgtgcattatatttccattggaccagtgatgcccaataaaagtttatgtagctgaattataaaaaatgttacttaatgccacatgtggagtaatgatgataatggtgatagctcatatttaataagcactaagtgccagacacagtgttacttgctctatatgcattactcctgcgagtcagacaaatagttatgtaaaggtccagttcaagagagtcatccgggctcaagaaagactggagggagggtatctgtaaaggcttcaaagtctgccacatattaagcacttggtaagtattagctatcaaaggaaataccagatagtaagtctactgtttaattaacttatgatactatactactcctaccgtctactctcgccctccgctgtcagctgggctaactcctattcagccttcaagtctcagcttaaaggtcatttcctcagcaaaatttactttcaggaccccttcatacgacccccttattcacgcccatggcatattctactttgcctctcggtaacatctagcaaggtcgtctttatacagaaactcgtgttttgagtactgcttgtggccagcgtacgagcgtagcttcccagcgcccagtgcagtgcctggctcagtaaatcttcaccgaaccaccccactccactccccagcaaaaccaccccagaacgaaggccacgccaacgcgggtcgtgctccgcgatgacaagagcccgcgccccaccaccagctgcccttcctctccatctctcagggtgagccttctccccggcgggaacactctctcccaacccgggcaccctcagggctgagggatgcccctttcctaggccacctcctacaaggcccctcgcgatcgcctaccttggccactttgggaatccgctgcttcccggccgcggtggaggccgccatgtctgcagcagtcgacctctggacacctgtccccggcacggacgctagaaatcggctctgagagctcaccgaaaccacaaagctttcagaaaacaaacaggatctcggaaccggaagcggaacttgcaggactgacctttgacctctcgcttgagccgtgacggaggcggcaccgtttccatggtgaccaggctgcgcgtcctccttgcggcagcgcgtggagtgcggcgtcctggagctgcggatgaggtgggtaacgccgtgctgactagcagcgacgcaaggactgcggtgcagggcgtccagggcgcatccccaggtcagcctccggaactgggatgaccaggcgaggacgagtggctctgtcgagccgtggcgccctgcaagggagtaagaacggagctccaatctggatgctcgagggcgggggaagaagggagagcgaggaaactaccattcccagcatgcgacggggcgagctgccgcccttttaggctgcaatgcctcgagcattgcattctagtagtctctgggtccacgccccctcgtttctggtttcgggacagttgtgcccaaataattctaaggtgcccaaataattaactctaaggcttggaattaaaaataacagaaggtactttgaagccagatattaggaaaaaatataaatagagtaactggaaaacaactcagtcttgtgataagaaacatgtttaaattctgtgtgtgccttaattactctagttaaattttcttagcctcaatgtcctcaactataaaacaaggctaataacatctgtttcactaggattaaagacaaatgctcagtagatgttagctgttataatacttaacctgccctcaaaaactgaaaagcaaaggttaagagaattttttttaatagacatttttagagaagttttaggttcacaacaaaattaagtggaagacacagagatttcctccctccacagcttcctgctatcaattattgtacctcttccctcctctaacagcctccaactcttaaaaatatcctccaccagagcagtacatttgttacaatcttgaacctacattgacacatcattatcacccaaagttcatagtttatattagggttcactcttggtgtacattctatgaggttggacaaatgtataatgacatgacttggcagctcatttgttaggataatttccacagttgcaaagctcttttggtgtttggggaaaatatatatttatgtatgtagtaatatcacgtctaccaatgcagatattactttcaacaaaagatttatgcagatttctagaactgcagtcagttataaccaacatcaatgtatttgccataactctttattaaccatattatttagatattttatctcacttttcaaaatttaaatagagaagattttatatcactttcataaagccacctaacaaaataaataaatattaaaaagatgtttctttgaagtgattttccttaaatgtgttactgtaaacaattgatttaccaaatgaatcattggtttaatcatctgttgcctttgctcaaaagtacaaacatgctagaatactttgcttctgatcaccatccttctctcttacatttctgttgtctggcaattcagttcatctctgtgtgtgttttttttgtttgtttttttttttttttttttttaggaaaaatgtattatccttcttactttttgccatcaatgcttttgtagatataccttcatgtttaccttcttatttcccagcatttaatcttgtattccacttctttctgattttattcttctcagaatataccatctcctagttctttctacaagattctttgaattctttcagtctttgtatgaaattgtctttattttatcttcattttaaagtgattgtttaggtttatcagtctaggttaatggttattttttccttttatatttttaaaacactattctagtagttagaaaactatgggccgtagactaaattcagcccattgactattttgtatggactgtgaatgagctagggatatatatatatatatatacacacacacatacatacacatatacacacacacattttacattaaactttatatgtagtttacattttaaacattttttaaaaattacatggcacatgaaaattatacataagtcaactttcagtgtatgtaagtaaaattttgtgggaatacattcatgctcatttgtgccgatattgtctctggttgttactgtgctacaatggcagagttgactagttgtgtagacaacatgtggctcataaagcttaatgtatttattctctggccttttacagaagtttgctaacccccgtgctactggcttctaatgttgctcatgagaaatattctgtcagtctaattattttttatagacagtctgtcttttgtcaggttcctttaaagttttctgtttgtctttagggttttgtagttttactatatatttggagtttatttgtattttttgctctgaactgaaggttcatgtctttcatccatgctaaaagtaattagccattattttcaaatgtttcatttattccttttggaattcccataagacagatgtttttcattctgtcttacatgtgtctttactgaattctgtattttctgtttctatgtgcttctttctagataatttgttcataagtatcttccagtttattttctttattcttctgtttttaacccatcctcttagtttaaattttaataaccacgtatttcattttttaagtttctgttcttttttaaataatgacctgttctcttctcatgacttttgtttctctttctatatttctttattataaacatacttagtttgtagtctgtttcagagtctatcatctaaagttcttggtgactcccataatacacagattgtgtggactagaatgccatacccactttagtctagaatttggacttctcagcagtatttttgctttattttctacctagagctttgtgtagagaaagcttgtcactttcttgggctggtgagtttaatttttctagccccctcacttaccgaggggcccatccaaagtcccaggtagatgcatggtttaatttttaattctctgtttggagtgaggtccattctatccccaaaacctgtgtcagatcggctcacatcattgccacctggttggagaatttccctcgctcgctttctttcttcttttcttgttttctttttaccaaagtcagttatctaattaattatacttccttattttattcagaatttttatatacttgtagcattagtttatgatatgtttcacaaacaagatgtctcattccaattttgctttcaatttaaaaccagaacaaggaatgacaatatttatggttagcttcgataggagtctagacattattaatttctccttcattgttttccctgttttgagctcactggctagtatataataaaatggctttccctatgaaggaaagaagggagggaaagagagaagagagacttacagaaattgagacaatgagagagaaattgaaatcattttgtgacctactgtttttgtcaacagcatttcccaaagtgtccttctggaacgttaggttctccactgttgccgtcattagagattctcttcccaaagagtgtcggaaaggctgggttatacaaagaaaacaagttgctttattatggaacctctcaaagatgttaatgggcctggtggcccttcaggaagcctattgcgagcatttcctacacttaaccacagaacttttttggtctcaaaatatgtctcaagactgctgaccttcagggctccagtttggagaactctattaagaacataggcagcagctgtcagtatttccccagtaactcttcaccacatgccatcgtggccgattaaatataagaggaccctgaatccgtaaataattcctttcaatgtttttccaattctattgttagaattttttaaagcagctttgttggaaacaaagaatatagttgcagaaacttctaaacaggccagttctcagaaacttcattctcctatggaggaacgtcagctggtttgcagtgacagttgtcacagactacacccaggggaaaacgtgtcacaccagtattctcacaccatgttcactctgaccacatggaaattgaattagtgttcagttttgtgtgtattataaccaaactggcttatcatatcagattaatagtggacttttttctctcttttggggacaggataaaaaatgtcagtactcacttctccaagaggaaaggtagaagttgttcattgccgaagaacagaatcacaggatgtttattgtatcaaaagccttattagaaaatttacctgcaagctgtttgggaagctaaatatcatctatcttctgtaagtagataactaagttcaagaatgttcatcaattttggttgggtgcagtagctcacacctgtaatctcagcactttgagaggccaaggcaggcagatcacctgaggccaggagttcaagaccagcctggccgacatggcaaaacctcatctctactaaaaatacaataatcagctgggcgtggtggcgcatgcctgtaatcccagctgctcgggaggctgaggcatgagaatcgcttgaacacaagaggcagaggctgcagtgagccaagacacgccactgcactccagcctggatgacagagcggacccctgtctcaattaaaaaaaaaaaaaaaaaaaaagaaggttcctcaattttatgacatgccagaaaaggatcctacctttttgtctttatggggcttattgtgagcaaatgggtagcttactgcacagtgaaaaaattgtagcaagaaatctctgggaacaacaaattcctatttcctataataatatgcaaatcaaaaaggtttctcatgggctttggattcaaacaaacttggttcaaatctcagctgcctcactcactagtggagtcacttaaaacaagttaataatattagctgccagattttgagaaattagtttatgtcaggctctgtgctatgccaacattatgttattgttctgatacttctctgaggtggccactatcatgtccatctcacagatgagaatgggaggctggcgcagggtcaaacagtacgttggaaacctggatttgttcacagccgctgctgttaaagtgttcttctgaactttaaagtatgcatagatttgtttcttaaaagatcttttttctctctgttttgtttgtttatagaccttctgtgggtgccaaaatataaatatccttgaatctgttcttcattatttaattaatttatttatttttgagacagaggtttgctctattgcccagatctggggtgcagtggtgcgatctcggctcactgcaatctccgcctcctgggttcaagagattctcctgcctcagcctccagagtagctgggactacaggtgcatgccaccatgcctagctgtttttgtttgtttgtttgttttttagtagagactaggtttcatcatgttggccaggctggtctcgaactcctggcctcaagtgatctgcctgccttggcctcccaaagtctttggattacaggcataagctactgtgctcgaccctgttccgcattatttttattgaaaatattaaatatcctagtattttggatttcataaagcttcatatcaaatacaattgaaatgtttaagctaaggccagcctaagacattaaagtttgtagtttctaattacccccctgatgaatgtaatataaattggcacaattttactagagggcagtagggcaatagttataaaatgcctaaaaaatagatataccaatgaaatgattttattttttggcattatggtggactcagtaccttaaagatgtccattggatggaaacaactaaaatactgatacacacaaaagctaaggactgtgtagggaacattatcaaattgaaatcagaaacttcattagataaacaggaaccaatgctagcttcatccttgaggatttttgccacattctattaatagcaacttcatatttctgttttgacagctttgcaaagaatggaagataactactccctccacctaaggaggaaagcatgtgacccctttgtataaaattgggatgttcattgtagggatgaacaagatataaacccactaaataaaaatggacagtgagggctcactcagccttagcatggaatagagggggataaagtctcttctgagaattcataagcacacactgatttgagatccatgttaattatttatgtggtccaaaaaatgttgaagtaaagaatttaattaaaaatagtcacaggccagtagtgtgtccaggaaactggctgacataaatgcaaatcaagtgtgaagggatgcagcttcagctcagactccaaataataaccccagataaagttgcaaggtatatgagctcacagtcaaaaatcgtaaacacacaaggaaacatgtatcattagaatcaacaagagaaattatataggataatcaactcccaaagacttcagatataaaattaaacaatgaatataaaataactatgtttactatgtctaaaataaaaaaggtaggtttaaaaagatgattaaagaaggccggacacagtggctcatgcctgtaatcccagcactttgggaggccgaggcaggaggatcacgaggtcaagagattaagaccatcctggccaacaggtgaaaccccatctctactaaaaatacaaaaattgactgaatgtggtagcgcgcactctgtagtcccactactcgggaggctgaggcaggagaatcgcttgaacccaggaggcggaggttgcaatgagccaagattgcactactgcacactccagcctggtgacagagagactctgtctcaaaaaaaaaaaaaaaaaaaaaaaaaaggattaaagactaaaaaaatctgggatgctgaggtgggcagatcatccgaggtcaggagtttgagaccaacctggcctatatggcaaaaccccatctctaccaaaaatacaaaaaattagccaggagtggtggcacacacatgtagtcccagctactcaggaggctgaggcaggagaatcgcttgaacctgggaggtggaggttgcagtgagccgagatcgcaccactgcgctccagcctgggtgacacagtgagactccatctaaaaaataaaataaaataaaaaataaaaaattataaaaatgaataatcatgtttaaacaaaagtgaaatagaccatctagaacttaaaatgtaattgaaattaaaagctctgtagatgaattaaacatccttcatagacacagttgaagacagaagtaatgagctggaggatcaataccagtaaattacccagagctcaacacaaagagaaaaaatatgaatgaagcatgagacctagtctagttagacttttagaagaagataataggaagccaaagggtaatatttgaagagagaatggctgagagtttttcagaattgttggaaagcactacttcttacatctggaaaactcagtggatcccaaaggggataaatacacagagaaatcccaactgtacccatcataatgaaacagcaaaacactccagttaaaaagatctgaaaaataacagagggggaaaaaaaaaaaaccaagttacctgcaaagaactaaagattagactaatagatttcttaggagccacaatagtagtcagaagatagtagaatatcttcaatagtggagagaaaaataacatcaatttagaattgtgacattgtttcacccagtgaaacaattcctaggggacctgggagaaaataaatgcattttctgacaaacaaaaacctaagtcatttgccaataaactctgaatggaggaaattcctcagaatatgtttttggaggaacagagaatacctcagctggaaagctcaaaacacaagaaggaatgtcaacaaaaatatggaaaatatataggtaaatctaagaaaaagtatgacttgcataaaacaataatattgataatgactgatttgtgaggtataaaccatatgttaaaactaagattcaggacaaaaacattatataaattgggaggagcatgattagaatgaaagaatccttcaggttttatttaagatggagggtgtggtaagtggtgtgcaaacaggctcccctggctccaatgagccacacatcctgtcacttacgcctttgtgtagtctgttctcacaaagaatcatggctcgccttatgcagccaatggaaagcagcagaagtgagactctatttgacttcaagtctaagtcataagaagtcttgcaacttccactgggtctccggaagtgctccttctcagaacccagtgccacactgatgaaagctccagtcacatgtttccctgtgggtgcttcatttgacagcctctgctgagctccccgctagcaactgccaccagctgccaaccatgcaagtaagccgtcttagacactgagtcttcagatggctttagccactgctgccatttgatagcctgagataccgtgcaaaaactgcttagttcaacccaggcagcccacagaaccatgagagataataattgctacttaaagccactgaggtttggggtggtttattacacatcagttgataactggaacagataataaagactgttaggaatatatattaacatggttaagatcatcattaaaagaacaggtgtagagatgataacttctgatctatagagggaaaaatggaatgagaaatttaaaatgaaccctgaatctaaaagaggacaagacaggaggaggaaaaaagaaacaaaaagcatagaatgtattaaaattacagaataagaaaataaattttactatatcagcaatcataataaatgcatctggacaaaaatcttccattaaaagattaagaatggcagattggctcaaaacaaaacagtcatattctatttgtgagacatacctcatatataaagtcacagaaatatttaaagtcaaagtatcaggaaaaaagatatgccacccaaaatctcacccaaaataagggctagtattgctatatcaacagcagacagtgtatagttcaggacaaaaagctccctacagataaagagggtcactatataatgataaaactgttgttgggagagctatgacagctttaaacttatatgcttctaacaacacagttctaaaatagataaaagtgaaaatcacaggtagagcactggagactctcccgcctccctgtgttccccatgcctttttgtgccattctccctgctgtagtccccatgttttctatctttgttgagcctgtgattcccctgacagaatgtaatggaagtggggctgtcctggtcccaggcccaagcgttaagatggcctggcagcagggctggcccaggagaggcacgcagggtatcctgggtactcactcccagctagggcccctgcatgaacctgagagtgaacacctccttccatttttgaaccctgggtccctctggcctcaccctagttcgagcctttgctgggagctttcagttttgtgatcttgggagccttgcactaccatgtaaaaagtctggctactctactggacataccacccagagaggccatatcgtaagagagaagtgtgtgcctacatggaggagaattgaggagcccagcctccagcaagaaggaaggccccatgtcactcttccaggcacaccccagcccctttgggccaccctcactgaggcacaagacacatgagggaaaaaaaccgtcttggaggttcttgccccaacagatacccctactgtaccctgtctgaatctctcacccatagaatcatgagcaaataaaacagagtagccactaaatttgggataatctgttatgcagaaatagttgaacaaaatagcaggtcttagagggaacttataaccttaaatgcttataacagaagagaagaaaggcctgaaataaagttcagagtttacctctaagagcaagaacagtcgaatcaactcaaggaaaacagaaaataaaggacaagagcgcatattaatgaaacaggaaacaagcatctggtagaggataaacaaagccaaaagtttgttctttaaaaagcctaaagaaaaaaaaaatctgacaagattaatcaggaaaaaaagaaaaactttcaaagtaatgtgaaaaggacataatcacaaatgttgctgaggttaagcaggtaataaaagggcattatagatccacaatcctttaactaaatccctcgtgactagttgtgtttcagaaagcagaatttaaaaaattagtttcttccattgatgaaatattattgaattccacccacaagggctggagagattttccataattacacacgttaggatatctgtggtaaaaatgtaagaatattttatatatgggatcaagactgtagagtaacctcctgtcacttcaagtccaattttgctgcttccagtttttagggctttatggatttaaagggattggggacctgtataaaaaaactgcatgccaataaatttgaaaatatggggtcccagaaaagtttcttaaaatcaacttaagaaatgatagaaacccattaaattgaatcgttagttttaaatcctcccgccaataaaatggtcggcacaagtgcctttataagcagtcctaccaaagattcagggattgggtatgtcccaaataaatacaagttcttggaagcagaaagatggagaatactttttagctcactttatgaggctagcataatgttgatatcaaaataagacaaagacagtacaagaaaggaaagttaacggccaatctcacatagaaagagaaatgaaattaatgttcatgccttgctcatgaacatggatgtaaaaattcaaaaaaaaattggaaaggaatctaatgatgaactaaaaagatatgattatgattaactgatcatggtattcatgattggcttaatactagaaaattgattagtctaattcatcaaattaacaaaggagaaaatctaataatctcaataaacagagacaaaatcattcgataaaatgcaatattcttagtaataattcttaacctaataagaatataagatgactctcatatgtatacaaacctttaacaaacaccatatgtaatgataaaatattaaaagaatccctgtatagtaaatgaggatgcctgttgtcatgagatcctagctattgcagtaagggaaagaaaaagcaataaaatgtactaggatttgaaaggaagaaacgaaattgtcattttttgcaggtaatatattctctacttagcaaatggaaaggaatgtgaattagaatgaatatagaagttcaaaattgctggctatgaagtcattgaataaaaacccattgcatttttatatactaacaatgaacagaaaacatttttctatttacacccatgccaaagaatataaagtacctagtataaaactgacaaaataactctaagctcattatggggtaaattgtcaactattgaaagacattaaggaaagcctaaatagagtaaccgccccccaccccgccttatctgaggggaatatattccaagacccccagtggatgtctgaaactgaggatggtaccacatccgattgttatcagtcagaacacatttttgttcatgccttccacccacaaatgtaacggcttttccatcgtaactaagcatttgctatgcactgtgaccataacttttgtagtttgaagtgcgacaggagaactaacaggaatttctttttccattttcacaatttcacggattaaagatttcttcttaccctagatcttagcaagctcagcatacaatttattttttcctcattaagttgagaattttcacctttttgtgtaaaggaagccttttacggcttcttttcagcatgtctgaattaccagcgtcactactcttgcactttgaaccaaagcactgtgatgcagtgacagtcgatctggtaacagaaggcagttaccagatctaatactaagtgactcatgggcagcagcatctacagtgtggatctgctggacagttcctgggcaggacgggctgggatggcacgtaatttcatcttgctactcagaatggcatgcaattataaatttatagattgtttatttctggaattttccatttagtattttctaactgctgttgactgcaattaactatgaaactgtgggccatgaaaccacggagaagtggggggactacggtatttcccaagaggtagaccacattttggacaggaagattcaaatcataaagttagtttctctccacccccgtcaaaatcctaacaagattatttgtcaagcttaatgagtctaaatttgtgtgggaaagcaaaggttcagggtaatctgaaggaagaaaaataaggtggagaggcttgccaactaaaggttcattgtaggtataataatcagggcagtgtggtaatttgcagggaattttgacaaaagacagatggaccaggatagagatcccagaaacagacgcatactatatgaaaatttgatgacggctttgtgaggaaaggatgtgccactcaataaatggtgctgggagtgttcgttattcacatgggaaagaaaataataaccaacctcatgtagtagaaaacttgtaaaaattaattctgggtgaatttatggtataaatgtgaaaaacatctgacatcgatgacagaaccttctggattccaaattcatttatccagcttcctggtgaatgccaacccttggatacctagtaggcacttggaacctagcatgatcttcacctgcattcaatccactcttcccacacttttcctatctcagtaattccagccttccccttgctcagaccccaaacatttaaaaaaaaaaaagttaaaatggaatctttataactgaaaaggttgcaacctatcttagaagccagcgtattttcagaagtaaaagcaaatttaaattttcattgatgtcctgaagcttccaaaacagctgctactaagcccacacagtgtttcattttttatattaggcaactcctgtcccctggccaagtcaactgcaaggcttaatgacttattttatagacattttgaaaaaaaaaaaaaaggtggttcttttgtggtctgtgtgtttggttttattttattgactgcctgttcagttacagaaatagaggaatgaataaaactgatctcacctaaaaatccagctaaattttagcagattgggcatggccgatgagtggggaaagggctgaaagaatcacctgcgtccagtgcaaatagcacagtggcgatcggggggacagaactgtgcccaggctgcagtttgtgagcaatggatgtgaggaaactctgaggtttctgggtgatggtgttgttaaatcaagcagaaaaagcgagtgctgtttctctatgatggaaatcttagaaaatcttttgtacaaagaacttaaacaaatttacaagaaaaaaaacaaccccatcaaaaagtgggcaaacagacacttctcaaaagaagacatttatgcagccaacagacatatgaaaaaatgctcatcatcactggtcattagagaaatgcaaatcaaaaccacaatgagataccatctcatgtcagtcagaatggcgatcattaaaaagtcaggaaacaacagatgctggagaggatgtggagaaataggaatgcttttacactgttggtgggactgtaaattagttcaaccattgtggaagacagtgtggtgattcctcaaggatctagaactagaaataccacttgacccagcaatcccattactgggtatatacccaaaggattataaatcattctactataaagacacatgcacacgtatgcttattgcagcaccattcacaatagcaaagacttggaaccaacccaaatgtccatcaataatagactggataaagaaaatgtggcacatatacaccatggaatactgtgcagccataaaaaaggatgagttcatgtcctttgcagggacatggatgacgctggaaaccatcattctcagcaaactatcacaagaacagaaaaccaaacaccacatgttctcactcataagtgggagttgtacaatgagaacacatggacacagggaggggaacatcacgcaccagggcctgtcggggtgggggctaggggagggataacattaggagaaatacctaatgtagatgacgggttgatgggtgcagcaaaccacaatggcacgtgtatatgtaacaaacctgtatgttctgcacatgtatcccagaacttaaagtgtaataaaaaataaaataaaataaaagttccagagcaggaaaactaatatgatttgatagtaacaagtccacattattttatgggttgtttactgggtgataaattaggaaactttttgtgatgatgtaaacattgacttctgtgtggagggggcggatgtgatacaaaggtgtatttattttctaaaattagttaaatgatacccacaaaatcatttcactgcatgtaaattataccacattaaaatattataaaaagttttataacatctgactcttaaaaaaaaaaaagaaaataagttttggctatactcggaaaatttcctgaagcagttgaataaatgaggcattgctctaatgaaaagagctctgatttggtgtgacatacgtgtgtatgtgtgtgtgtgttaatagggctccttcagtttggatttggcttattacaaagaacagtttaaaatccaacatttaaaaatatgccttctcagccgggcgtggtagctcacgcctgtaatcccagcagtttgggaggttgaggtgggtggatcacgaggtcaagagatccagaccacagagcgagactccgtctcaaaaaataaaaaaactaaaaaaagtaaaagagatcgagaccatcctggccaacatggtgaaaccttgtctctactaaaaatacaaaaattagctggacgttgtggcaggcatctgtagtcgcagctactcgggaggctgaggcaggagaatcacttgaaccctggatggggaggttgcagtgagctgagatcgcgccactgcactccaggctgggtgacacagcgagactccatctcaaaatatatatatatatatataatatatatatttatattatatataatttttttatatattcatattttatatataatatatattcatattattttatatataatatatatttatattattatatatgtatttattatatatatatatatacctaccttctccctctaccttttcctcctcttctttccctttgttcccatggtgatttttatctgtgctatgggggacctagtgactaaggggtaataagaagtgaaaattatatacataaaaggataatgctacaaaagttactttttacagtcagctatttgtaaactgtagtgcattttcccattgaaacaaagtaattcatggctggcttcccaggccaacccacaaaagcatactgaatctttaatgtctatgtggtatatagtattgtgctaattgtactgtaagacccaaccagcatcctgaggttcccatggataaatgcatttcgttagaattggattccaggaacacattgttctttgcttccctgaggggatggtggctgcgctgtcccaaattcttgcccacttcctcctccctaccatcaccactatcgtcagagctgacatgtacagcgtcttgtgcattttctcatctggtttagagggagcactctcagcttgagaccataggtcatgactctgggagtctggggcagaggagcccagaagaccaagagctggagggagatgacttacaggtagacggaagttaagggttcagtgagaagttgtggggctgcatccctgtgctaaagagccctgtgtggatactgtattctaggaacctgggacagtctactccctcctttccttgatagccagtgctcgtatggggcccctggaccaggagcagccctgcttcattcccctgtggctgaggagtgtgatcatatgtggctgctgtgacttcctttgagaagggacagtggctgcaggcactgagattgatatccccagcacaatgtttcccaaagacgcccgtacatccggtggtacccagggggatttcacttgctacatgcaggaaaaattttttgttttaaatgttacatctttatagttaccttcctttttatttcttttgagacggagtcttgctttgttgccaggctgcagtgcagtggtgccatcttggctcgctgcaacctctgcctcccaggttcaagccattctcctgcctcagcctcccaagtagctggaactacaggcatgtgccatcacgcccagctgatgtttgtatttttagtagaaacagggtttcaccatgttggccagaatggtctcgaactcttgaccttgtgatccgcctgccttggccttccaaagtgctgggattacaggcgtgagccaccgcgcccggcctttaccttctatatataccgagagatactggttttccatttatggtagtgatgtatatttcctattaaaattttaagcccaaagtaaattgatttaaagaaaaaaagtacaggaagcgcatgtgtgtgagagactgctgtttggtgaactgctcttgtaaaaggttacactgtcaagtgggaaaaagcaggctacaaatagtataggttgtgagattccatttttattttattgttatttattattattatgttttgagatggattctcgctctgttgtccaggctggagtacagtggtgcgatctcggctcactgcagcctctggctgctgggttcaagtgattctctgcctcagcctcccgagtagctgggattacaggcatgtaccaccacacccggctaatttttatatttttagtcaagatgggttttcaccatgttggccaggctgtctcaaactcctggcctcaagtaatctgtccaccttggcctcccaaaatgtgggattacaggtgtgagccaccgttcccggccagattctagttttaaaaacacacgatgtacatttcaacgtatagttacctcacgaaaagataagtctggagagacagaaaccaaagtgttgacagtggttggttatcaatggaaggtgggattaaaagtgattttccaaattatttattttttctcttcttgcttagattttctcgttcttgtctgcactgacagtgtattccttctgtgataaaaacataactggaaagcccatgtcactttctgtcctcctgtcatctcctctccgcctcttcctccagttacatgcttgcttcttcctgttctcctcaagaaggaacatgggtaactgctgccttctttgtgttttgagtgaatgtttaactatttcttcctccaacttaagatgccagtagatttcatttcactaagaaagtaaaaaatgcatttaaatttatgcacaaatggttcttggggtggtaaactatatgctgcctttaagtgcctttaagtcttgctgccttgatgggccacaagacagggtagcagttgggagggattgtcaagatagtccctctgagacaaccaccagaataagactggaaagcctgcttctcctctcttcgctttattaactcactgggttaccttagcttaagcaagacccctgggagtccccatttctgcagctgggtcagatgatattccagatgcccagattccatatgaatgaatcagtaagtccagggacatgaactcacagtttggaggaattgcttgagaatggtaactgagatggagctagactgttagctttactgctgttcataggtgacccattcatcctagtttgcccaggactttcatttttttaatgccatgaaagtcctatatcttgggcactcccagtcctgggcaaagagagacacttggccaccctaaccatagatgtttaggccaaacacagtggtactggcaacatggagaggataggggaaactgtgtagtcaaatatcttcctagtcagtctccaagggaaagatagtagatactcaatatcataaatgtaatacctttctaatgaaatgtcattttgaatacaagtttagttgacagcaccacttgtcctgaacgatgtaccccaaagtggctgcaatatcattctcaccttttccaaagattatctgacctcatgcagtggctgctgagctccagtagccagagggaaaaaaatggcatgtcctcacctcactttttgtaatcttattcatgtttgcaattgtaatcatttctgcagagaaaaggccaaccttgctgttaccctctgcaatgacaaggaggagatcatggcccaggccaccttcctggactaccccaactggaatgttgccaagcaggatgactgggtgtcagtgttccgggagctcgacagtgacatcccatgcacagtaagaaatcacatacagtgcttgttagaacaccctgaatcttgaggggaagtcctgtgtttgtgattatgtctttccaagttttgtactgagcagtatatgacatcatgacagttaaaagtgaagggagctggtggggaggaaaagagggctgagagtagtgccaggggggataggaaagggcagggagtagccaagttggctagccgctggcaaggcctggatcgtgcttcactaatgacggcgggggaggaattagtggaagtgtcaaacgtgtgcttccaggtctcacgttgttctccaggcgtcagtgtccaaggtcattgatatgttaggagagcacctgccgtctacacaattgcccttgtaatcatgacagcagagcctcagacttctgtcacattctataattttcaaagtgccctcatggaccttggcttatttgatgtcttctagctgctgacacatgacaacttgtcagccaacagaagctaggttagtggttcccaggagtctggcctgggtacctgatgccaagtctgagctttctctgcatgcaacctgccagagccaggccagagacaggccccagtttttgtggagtgccagaggctacaactctgggcagcaccctggccttgtggtggaattctgcagcatgtccccagagccctgatgtcagaagaaaagggaatgcccaatgagtgtgagtgaattcaccccccgtacatgtgtgtgaatgtgcacacatacacacacccgtaagcatattattcagcatttatttcactagatggtgccttcccctcatcttttgtgttctctcctaccctgccaccctgtatacctaaggactattgtcagaaaaattatcgcaaacttggaaatagaccaaaacgattatttcagtccaatgcttgcacctttggttgagtagcctgttttacaattctgtaggaatggtgattagcctgtagatttttgtccattaggatgtaaagaattcctgtctggatagagctaacctcaaaggttatggtttattgtcttacaggatgtgacctatttggtatctaatctagcaatctttttttttttttttttttttttttttttttttttttttttgagatggagtctcactctgtcgtccaggctggagtacagtggcacgatctcggcttactgcaagctctgcctcccagattcatgccattctcctgcctcagcctcccaagtagctgggactataggcgcctgccaccacgcccggctaatttttttgtatttttagtagagacagggtttcactatgttagccaggatggtctcgatctcctgacctcgtgatccacctgcctcggcctcccaaagtgctgggattacaggtgtgagccactgtgcctggcctaatccagcaatcttattctttccttttcctagtaaatcacctgaagtatccagctcttcaagtgcaaagaatcatttttatcatctcactggttgcctcattaattgatttgttgaagttgaataaacctctgatagatgtttattttatatttgcattagggttatgattttacctttctgaaaattataaattaacactcttattcataaacacatgccccttttgtttcttttcaagctgtcttctatgacagtatagtgctgggctgtccaatgtggtagccaccagccttatgtaactaacgagcgcttgaaatgtagctagtctgaattgaggtgttccataagtataaaatatgccagatttcaaatacttcgtaggaaaaaaagagtgtaaaatatctcattaataatttttataatgattacttgttaaaatgatataatttgaatatattaggttaaatattaacttaaatattaaacattaattcacctgtttatctttattcttttttaatgtgtctactagaaaatttgaaatgacatttgtggcttgcattacttttctgctggatgtaaccagtatagagcctttaaggcttaatgcagtatctatcccagggatatttgcagctgaagtaatgatttttatcttaaagctaaagaataaatcttgcattgtaatatttatgatggaagagagaatttgggagacaaatcaagcaagtaataagccatatgctcctgaggctagtcctattcaggatgtaaggcaaatgctgagtgagattattgtgggattaaatgagtgaatacacagcaagtacttgaaatcatgtcgtcgtcatcgttatctggacttttgggatttgtgttgtttgccttttgggagttttcaagctcatgaatcaaaacatggttttcctcttgcgcttttagtcaccgtacaattctttccgagtgcttctgagtcacacaccatccgacagaagtggggacaaggcacacagaagtgccactggtcccacaaagctgtccagaaaattattcaaaaaacaagaaacctaggcagcacctgtgctgtcctgatataggtaccagcaccaccctcaccagtcagccagtctacatctgcactgtttccagaatttgaagatttgttcataagcacaggggtaccgagttgagtggaccaatgtgtggatgtttgaaccatttactcattatttaggccactttaaaagtctcagaaggaggagacaaagctcttttaaaacttggaagatttaactggaaagtcttgctagaatcttgctactgtgagttttcagctcccaggttttttggatcccaagagtaatatttgattctgactctgggaatgttgaacaaaacaagccaatggattctgaacgtggcatctgccttccatttttcaaattcataagagcatctctccctcctgtcacatgaatagagcagcagctgctgactcaagagcgccgggaaaagggtgattgtctttcacttggcatagacacccctgaggacaagactactgagttaataatcgatttcactcccctgcaggctctcccgcagctcattcgtgagggcaggaggaagggcgggtgctctggactcatttacagtccctgtttccttaaataattgtgagtaaggaggacagaaggcggcaaacggagtcagtgagacagctcaaatgccgcctgggtgttgcatcacttagacataaaatatcaaccctaaatgccaggctgttctgtgtctgtggatgccccgaaaccctctttccaccctgtgctgacctagcccgaatactgactcagcctttaatccgtgttctctcttcttctgcagcccctgaatacgttgttcatgcacctctttgtggccgtggatgagtattctgttggctgttgcaaagagattcttcggtgagtggatatggccgtgcagtggtgaacatgaaagagactgtgtggatagttttgaaatattttttaaaagacatgaaattctttggggtgtttaatttgcttgtaatttgtggctatattaaaatatttactttgaatagcaatgatatttctgaaaggagatagttctttgaatctattgtccattctgcacgctgttatcatttgaggcaaacagatagtgcagtaatttaaagaaatggatttaggttgaggggagtaggagaagaattaagtgtcgcaagcttggacatttctaaaaactgcttttctttatcttatctttagaaatgtttattaacatgacagacttcaaagcatcctgaataataggatgcatggaaaatgaccagcagggctaccgagtcatggcgatgtgtctctgacagcctctgacagcctgcacagacatttgggggtggtggtcacagctttcaagtcactttgtaatgtcacaccagaccgtccagatgccaggtcaaaggttaatattagcagaaatctggtgtgccatatgaacatggcaccctttattctctctgcctccatgggacagatcgaaaaggggccctttagaacccaaggaaaagtagagaagaaaaagaaattgccttgaggctgttcttgccattgcaggtggggagcaaaggagcccatgtggatttaggaacacctcacctttttagtgacagcatttgtcttcatcaagtgccagctgatgggattgctttgttagtaacactgccccaccctctctttcctcaccagaaccgtgtataaggcagtgccagagctgcacttcatatttctcatcgtgccatcctacatgagcctaggtaaggcccgcccaaccacctctggtccccggtagcaaacattgaaaattcactcccagaatggtgctttggggaatgagaaataagagtggtctccaggtcctcaatgtaccatgtgcatattttattagaacaattaagcacaatttagaatggaaactacattttgttctgacatcccaaatttatttcttgataaataaggacatgtttctttatctctgtgatttaggctcaactctcataactgtttttgaccaagtggggaacatcccgtgtctgacgtatgaggaagactttgcagtgcatatatgtcacaggcacagccactatcctcagctgcacgttcgcaaagccaggtacagttggagtcatgccttgtgtgacctaagcttcactgggacagtcatcttcccaagactctttaaactaccaatgctaagtgactatagcttagatcaaaattttttacaatactcataagcattacttcatttggatatctttatagttccccttaatgacattatttgcaggactatctgatgatactcatttggttctatgtggctataacattattcattgactccttaggggtttctgaaaacacacaatcctaggtcccacaccagtaagataactttcaaataaaacaagcttaaaaatgaacctgcctattcagttttctcggtaaaacccacctattttctgacattcagtgaatgaggatgctgttgaccccaaagaggggttttccaaattgaaggtctctaccatcaggtgccccaagtccagcagtcttagggagatggctgtggcagtgttttccaaagatggctgccacactactttccaccccgcaggctactctttgatgtgactttgccactcctctcttcaagccttgggcgctccgtcctctcttcctgaagctgggtgggttgtgactgctttgaccagtagaccgtggccaaagggatgctctgggacttgtgaggctgggaagcttctgcctggctctctcaggatgcttgctctggaggaagccagccatatgtaagaagtctggagaagccacatgttcgcaaggggaggggtggttgacagccccagctgggctcccgctgacagttagcttccactgcctgtggtgtgaatgagccattgtggacacccagcccaggagagccccatatatctacagcacagctgacatctgatcgcagccacatgacagaccccaagtgaggatgcccagctgagccctgccagagttctgactcacaaaaccatgagcaatgtagagtggctgtttggaaataagagtgcattatgaaatcatctcacagaggtggttgcttggcttatcagtgaagaataaattgtatcttttgggatcagccattgctgtgtttgaggaatgctgactttctttagaaaagtattttaaaagttttaaaaactttataaaagtaagagcctatgatttaccaggcatgtagcagtggtatggcatcgttgttaagagtttgtaatgctggcatcggatagatctggattctgatcttggctctcctgctcacgaggtgggttaacttacaaaaggaacgtgacatctgcgggggtgtaagttccctctgtcagtgggtgtaagcgtattgtctacagcacaagattgtgatgattgtgagctaatgaacatcaagcacttagcacacttcctgccacatgtaagggcccaataaatattaaatattattatgacaaaggggcttagagttaagtggtggggagagactcatcttcagttaactgtcatgttggtagctgagaagcgggatgcacagacagagatgaagacagcttcattacaactgctcctccgcccaaaaaaacccctctaaatgtccatccaccagttaatgttgtttacccttataaactgtggtacatccatacagtggatgctactcagcaattcagtggaatgaaccatttacatatagtagcatgaatcaatctcagaaggtttatgctgagtgaaggcagacttagaaaagcatatacagtactgctgattacacttttgtgatatacaaaatgggtgaaaagcatccacagagataggaatcagatagagatagaaaccaagatcatggagatcatgacacaggctggaattctagcagcgacaggtcacagagatccaggttgttgacagcaagagtcagactctgtaaaatgtttgaagaggtttattctgagccaaatacaagtgaccagggctttgacacagccccaggaggtcctgagaacatgtgcctgaagtggttgggctacagcttggttttatacattttagggagatataagacacaaatcaataaatgtaagatgtgcattggttcagtctggaaagacaggacaactcaaagcagagaagagccttccaggtcataggcggattcaaagattttctgattggcagttgattgaaagggtttatctaaagacctggaatcaatatgagggagtgtctgggttaagataggggttgtggagacagaggttcttattgtgcagatgaggcctccaggtagcaggcttcagagagaatagattgtaaatcttttttatcagacttaaaaatatgcctgactcttagttaattctctcttggatcaggaaaaatgcctggaaaggaaggggattcaccacagaatgtagaattttctccgaagagacagttttgcagggtcatttcaaagtatgtcaaagaaatatattttggggtaaaaaacttcagtttatttcagggcctgccctgctgtcatgtttgtatcttattcctacaaagagtctgttctgtcattcttaagatctctgttttcatgttaatcctggtcaaatgttcctaaattccaaagggaaagtataatgaggcatgaccgaccacccaatcccatcatgcgctgaactggtatttcaggtttatgttagaatacccttggctgagaggaggagtccattccattggtttgggggagcttagaattttatttttggttacgtggtagggaaaggatcaggtcaggtgcatagatacagagagacatgttagagagtagcgcttggctaccagttggatggaggagttgagggatgaggagtttatggtaattcagggttttcaagtttaggggaaatggtgctttcattaactgaaagtagaaataatagatttaaatggacaggagaaggtaggaaatagaaacagagggagaagccaggtttgagatacacatttgtgagttgtcagtttgtcagtaagtggggagatcatgaaatgaaggagattgtcttgctgagggggagattgcacagtgaaaaagcacaggaccagggcagaactttgaaagatgaaaatgagctatgaataatgaaaactagaagagagggagaggaatacagaagaaattaagactcataaagtggcaaaagatgcagggaaatgaaattatttaagtaaaagagaagccattagatttggcaatttaaaaaggcacagataggatgaataaaactgatacttccagccaaactgaccaagaaaaaagacaaattgccagtatcaggaatgaaagaggtggtatcacttacagatcctacaggcattgaaagattaatatggggacattacagataactcaatgtcgataaatctaacaatttagataaaaatgggccaactactttaggaacacaaattaccaaaactcatttaagaaaaaataggtaacttggatgcttccgtatctattaaagaaaaatcagatgaactttgggtgagaggaagggggccctcctgcccagacattggcctctccccaacccacagcctgatttgctctttttctcctctttttctcttgttctcatgactctgaactctgccttcctcaggacctagtcctcagttttctctcaagctcatccctttgactcctctgtgccaaccttgccactcagtaaccagtgccctacttctgaactcttggtttggggtgtggtcttgtcactccttgaagggcagagtttcacaggagaggccaaattgcagtgagcggaataaatgggaggtaaggaaatgaaagcaaaggagtagtcagtgctattttttttttcctttttgctggagaaagtcactgctcttcagagaagttttgtgttgaagggaagcagagagagggaggccagaaacctacctgcagatgctgaacattatgcaaacagtgtaatgtgatcccgtttttcctatccacgtggagcattttatttgcattctgagagcggggcagcatgtctcttaacgaagttcaccaagaagcagatgaacttcagatacatattatctacctaatttagtttgagagaagaaaattcctcatataaaatgatctttcattactttctttttattaatagctaaataatcctctctttataaaaccctttgataatgatacaaatactaatgcaagccaaaggcagtctgaagaaatggaattttgtgtatgaaatgacatttttaattggttctctcatgtctttcaaatttttattcctgatttataaagtgtctcttgttagtgtcaggggaggcaaatagaccctcctgtccttcaggaaattatattttttaaagaaatattaccttcagtttttaaattacaagaatctccacaaattaattacttaggatcttgtaagtagtgtaacaattgttacacttttatattcattttaaaatctctcattttttatgccatttactaattttttggggagatgggtttatttaataaaatgaattctagtttcaaatcataaaacttaaaagtaaaagttattctttcatttttctgtgtatgtaactatacacacacaagtatagtggcatacatgcactctctctacatatatacctatatatatctccatgatcatatgttctgttaattatatttttcacttaacatagcatctcatcatttatcatctttagagatcaatttctttcttttctgatggtgcctggtccatgatggcctaaccatcatgtagctctaatacaattcatttagctcttgcttatttatggaaatttaatttaagttgtttcctgtaaaaaatttaccactttttctataaaaaataatactgtagtaaacagcattgtacatatatcatccagcattcatatatagtagtgtacaacagataactaaatgtggaatttggtgtaggaaatacccagatgtttgcaaattctaagatttaaaaatagatgccaccaaattattcaacgtaaatatcatatccatttatattctgaccaaatagagttgtttccttacatcttcatcagtgctgagtattttcagttattaaaactgtttcctggccgggcacagtggttcacacctgtaatcccagcactttgggaggctgaggcaggcagatcacgaggtcaagagattgagaccatcttggccaacatggtgaaaccccgtctcttctaaaaatacaaaaattaactgggcgtggtggcatgcatctgtagtcccagctactcgggaggctgaggcaggagaatctcttgaacctgggaggcggaggttgcagtgatccgagattgtgccattgtactccagcctggcgacagagcaagactccatctcaaaaaaaaaaagaaaagaaaaaaggttccctgttagaccaaaatagtattttgttgctttaaattgcatttgtctaaatctgtgagagtttgagtgccattttacaggttccattttaaatgaataaaatacttgaatttaaagtaacttccagttaagctatcatcctaccagatgattaaacatgttcctacaaagtaggcaattctagacaattccaaaggattgggcaggggatagatatgagttacttacaactgacaaaggcaaatttctaaaagtattttcttaagttttagtcaggatacccgatttgtatcttgggaattatcattttctggaggtatgtagggcttaattaaggactttcaacttagttattcagcaagggattattgtaatagaaaacttgtatataaatccaacactgaaaatgacatgtatagaagcagcccattcaaaaattccctattcctttcactttttagtaaggtattgtctgttaatttactcgctaatagcctacttgtcactcaggatgcagggtgcaggagaaaagatgtgggatgtgctcagcccagtgccaggctcccagtaagcatttggtaacagatggttatggtttggtctccctttctgcctcctttcctacaccccttccttcttttcttccatttttctcttgaaaacttgagtgctatggactataaccttcagtggacaaggttcacaaaacttgaaataaacctggataccttaacctgaggtcttgcacatacagcccctgatgtgcccatagaaaatctgaaagaagcaaaacacaagaggaatgatagcaaagaggtgacagtgggtactttgcagtgaggaagggatgtttattagaagataagtggacagtagtgaattcgtgtggaaatggtgacagtatggcagtcagtgcctttgcctgcagaaggtagagagtgtggcacattttagaaagccctctatccacatgttcagattcgagttttgatacttgcaggcacagaatttcatgtatctggagattgcagttgtgtggactacctccctccttaacaacgctagaaaaatggagactttacagaacatcaaatgggcgtggctgtgtgcctcttaggttgcctcctttctcttatttccctcacatgtattttttgacatccgtttcaacgatagttacttgcactgatagttaatggtgaagaacacaattcgtaagacactgaaccagtgaagggtttggggatgtaattatccttcagccatttggctagtgacacattcaaaaccaatgaattaacactgtaatcccctgtcctgtttctttgatttacccatgtggaaaattatgctgtaatctgcccatctacttagacagtaattagtgaagttactgttctgtacttttcatactatctgaaataaagcatagctacttctggacacacctctaaaatctacagtgggcttaattaatcatccatggtggatttgagatgtgttcagatttagaaactactggcatgctctttttctgggggaaaacctgtctttttcaagtcctcctggggctgggaggagacttggccaaggaaaggattatgtgctttcaaacaatgttgtgaaataactggtttccttagtggagtattgcttctttgttgataacaatggttgattaaattggctcaaccttgttgctttttaaaatagatgaaaaatctctaatcatcagggaaatgcaaattaaaccacagtgagatactactaccttactcctgcaaggatggccataatttaaaagtcaaaaaacagcagatgttggcatggatgtggtgaaaaagaacacttttacgctgctggtgggaatgtaaactagtacaaccactatggaaaacagtgtggagattccttaaagaactaaaagtagagctaccactcaatccagcaatcccactactgggaatctacacaaaggaaaataagttattatatgaaaaagatacatgtatacacacgtttatagcagcacaatttacaattgcaaggatatggaaccaacctaagtgcccatcgaccaatgagtggttaaaggaaatgtgatattcatacaccgtggaatactactcagccataaaaatgaacaaaataatgtcttttgttgcaccttggatgaagctggaggccattattctaagtgaagtaactcaggaatggaaaaccaaataccgtatgttctcacttgtaagtgggagctaagctatgaggacacaaaggcatacagagtgacatagtggaccgtgggggctggggagggggaggttcggagggggtgaggaataaaatccaacctattgggtacagtgtacactgctcaggtgatgggtgcactaaaatctcagaattcactactaaggaactcatccatttgactaaaaaccacctgtattcccaaaactattgaaattaaaagaaataaaatagatgaaaaaaacattctttaagatttaagatgggtggtttgtaattacaaacttttaactcttaaggcaatcattttaatgaaacatttgatagtcccatgtcatgctttttagaaatccacttaaacttgacttctgagcaatttcatatgaataattatgaatatcctaaagcattccaaaagaagggatagggcaattacagatttcccccaacaatcttcatgaataagactggtaagtgaccaccaagtctatggtggagccaagtccagctggagccatactagcccaggatggacgtttagatcagatgtgctttgaaaagcacatgacaaatttgagcttaaaacccttcataatttttaaaatcatgacattttccaaggactagaagctaaatgactccaaaacccatttggaagttctacagtggaatactatatggagtttagaaatgatagatttgattttcttaaagaagaccactagaggtcacaagagatcttgaaaagaaaaagggtgcttggttttgcatacctgaagtgaaagaaaaatctagttgacgccgatcttaggttctcctaccccatgttgagatggtgttcatggtaaaaagttggcttaactagaacacactgcattctctatcactaccactaaattagattttctatgacttgttttcttaattcactggtttcttaaaatacacacacacacaggtttgaagaaatatatttatggtgtttgaagtgacaacattcagttgtacattttacaactgtacattttaaagtccagctttaaatacaaatcctctctggatatggagaatatcatcagacaggaatgaggaggctgtgccaggattctggatgcggaggtggcctgctgctgctgctgctgctgctgctgctgctgctgctgtcactccagtccttaagtgtgagttttccatctgtgcatttgcagtggtttctgtgctggcagggaagtgatgcacacctctcagactcgagggaagcaggcctgcaggttttcctctggggccgtaatcatgtagtgcagcagccaggctgtggaggtgatgaagcaatgtcaggatctgcgtgtcacccagagacccatcaggctgcgagggagagttctgcatgttctggatgtcgcggtgctcctagcaagctcagctaaccgactggtggaagtgctgagggagtttgtcctcacttctccccaccttccaggaagccagtgagagctaccggctcatttctagctgtggacttagaagacacccatttcccaagtagggtgtcctgaaagggggttgatttccttaaggtgtgtgttcaactccatttcacatggcacagttttcagagtctgatggaaatctgggtgtctgagagattgataagtgtttatgaggtggaccttttgtttcctccagggaagttaaaataaaatattgtataattgatgacgttaacaagcacattgctgccccctccaagacacattcagaatggaagatataaagtaactttgcttttcgctcagagaattgtactatttccgttgcactctgtgctgatctataaactccgcatcttcatcgccactggaacactgtgcggcctgtcagtgccagggcatgtgacgctgcggtgccaaattcacagtggctctccttgcatcctgactttgacaggcagcgctcattgcctcagaacagtcacgttgaaacatttgactgcatgagttgttttccatagctggggtgttttgtttctgtggggctggactttgtcatatgccatttgagactatgtgaggctgatgtcatactttatcattagcactcgggctgatgcaagatcataaattatcaattaccccaaggaatgcatttagcagaacaagttcctctttatccattttgggaaagggcttaagagagagcctcttcagaactccaagatttggatgtttttctatttttcccagaagaattcgtgttgaggtatgattatggataactttgttaacgggctgctgaggttcatgagcaggcctagggctctgggtctttcggaacctttattcctgatgtttatagctacagagtaatatttctgtgtccatcgtatatttaaaagcctatggtgcacagttgattgtgtgtgattgctgtcttcattcacttaaatgattaggttattgaattatttttccattatttaaaatgtctgttaataaatattgatgcaaccttttatttttggcaaaacgtttgaaaatggatttgttgactactctctcctagaattttttacaaattattcttagccaatatcatcaaggactcttttttacagagaaaagccaccacctcttattagcaatgcccttttggcaggttaagtggggaagtgagttgttcctggaatgttctaggctttttctgccaaggttctgagggctcacgtggagaacaaacacttgctaaggacttagtgtgccccagagagcaggctttagtgcgtcatctgtgtcttgcagctattcttgtccctacctgttttttgtacatgagaaaaccaagtcttagcattgaagtgactttgccagtttcttttttttttttctttcaaattttattattattatactttaagttttagggtacatgtgcacaatgtgcaggtttgttacatgtgtgtacatgtgccatactggtgtgctgcacccattaactcatcatttagtattaggtatatctcctaatgctatccctcccccctccccccaccccacaacagtccctggagtgtgatgttccccttcctgtgtccatgtgttctcattgttcaattcccacctatgagtgagaacatgcagtgtttggtttttttgtccttgagatagtttgctgagaatgatggtttccagcttcatccatgtccctacaaaggacatgaactcatcattttttatggactttgccggtttcttagtcagtagagtcagaaggctaagtagaggggctgtgatgccaccagcatgggaccataggttcagactgcccagacgctgccccttgggcataaaaattctgcccttcactgctgtcagtgtaaatgggacccttggcaaggtctcagcacaaggtaagggcccagttcacgttggctattgctgctgggttacatgctaaagaactgctacagaattccttctgtgtccctaaagagcattttccgtggttgggaagatgccacaccttggccgtaagaattagcaccagaactggacaatatatatccagtgatgatcccatcattgggttcctgggaagggaagttgggagagaagagtcaccggagggtgtagggtggagatgagctttggaggatgctggaattggggataggcaaggggatcagagcactggctagaaatagaggtgggaaggagggaagatggtgaagtctccttctagagacaataagtaaatcaacttgtatcattattggtgactagggtggaaagatgcaggcaaagaattttgtgcccatcccagaaacagtggggagcttgcaaaagtggagttttaaaaaaataatttcaatttttattttagatttagggggtacatgtgcaggtttgttacccgggtatattgcatgatgctgagatttggggtacaattgatcccatcacccaggtactgagcatagtactcaacagtttttcaacccataccctgctccttctctcccctccctagaagtccccagtgtctatcgttaccatctttatgtccctgagtgcccattgtttagctcctacttataagtgaaaacatgcagtatttgtttttttgttcctgcattaattcacttagggtaatgaccttcagctgcaaccatgttgctgcaaaggacatgatttcattatttcttatggctgcatgtaaaagttttaaagtaagatgaagaaagcagggttttaagaagattagtgatggtggatggaatgacagagtttctccttacagtagtcaatgggaagtgagtgcagtgattcaagcttctgtagtaagaaactctcttattccacccactgactgtagaaattcttcagttctttttggtttctcctgcctaagtaataatgataataacaataacattgcacataacccttttttaacgtttgctatttttgtgacagatgcacacacggtaacatagagaggtaaagtacccaaggtcacagctgggcagaagcaggatccagacccaggcagcctggctcccccgctcaggctgtgaccactatgctgtatcatttttttttttctaatctcttcaagagcaccataagacttaatgcatttatggtggcgcctcagtccactgggccacaggtgaccaccgataatgctcagtgatcacatgcagaaatagatggacaagtggtcaaggccctaccttttgtaaattattgcagggctgaaatagcttgaaaaatgactgcagcatcagtagtacagtcatacccattcaaaaaatggttgacatttgtttctggcttcctgttttagcctcatcactagaaattcctgctgatgcccttgcatcatggaataagactgtttggtggtgatgacatcagggccaggttgacagttttaaaaaacaaaggatctggttgcctggttaaggaccctttgctgtctctccttccagagagttttgacaagaggtgtattagtccattctcacactactataaggacatacctgagactagactatttatgaaggaaagaggtttaattgactcacagttctgcagcgctggggaggcatcaggaaacttacaatcatggtggaaggggaagcaaacacatctttcttcacaaggcagcaagaaagaacaatgagagccgagtgaaaggggaggccccttataaaaccatcatatctcctgagaaccttctcactatcatgagaatagcatgggggcagtcacccccatgattcaattacctcccaccagcttcctcccatgacatgtggggattatgggaactacaattcaagatgagatttgggtggggacacagccaaaccatatcaagaggttaacaagaagattcaacctgtggagtcatggtgatggtccctcccatcccgagttgtcatcttctgtgtgtgttttttcctccttgtaccgtggtcttgttggctggctccctccttccctctgaagttttatagaccagagacctggcttttcaactgtgtagttcttccatcaagatacttactgtttttaatgaaaaaccagcatcatttcaaccgttacacttgtgtcagcagaggcaaaggtttcatcctgggagcagggtgaagattttcatccagagtgcatgcggtcattcagtttaaagcatttagacttaggaagtgcagctgtggcaggatcaggggattcgttcctgcagggcgcaggaggaatggtggcagggctggcaggacgataacctctggcccctagccaaggactcccctctcaactcttttgcttccagctacaaatgttcaaaagaagagtcaaaataaaggaagattttgaagtgcattgtcagcttagcagagtgtgaaggcagggcttaagtcactagaccagagctcatatcacggctctgctgccaactatttctgtcatctcaggcaaagcatttcctcatccccatgggccttgctctcctccctctgcaaagtgaaaatggcagtgccaccctcctgggatcactgtgagaaacacagtagcagaaatcatctggataaagccctgagctttatatatatatatatatactgatcactcagtagatggagctgctattaacgtcaaagagaacatactagaagataaaatgggatgatgaagatggtagcatagtaaagctagggggaggaaatagacattagtagccaaagcagatatactagaaaaaaataacacaatgctgaaacatttttacagaaagagtatcagagaaaaaaaaaaaaaagcaaagtataagaacatcccacacaggtaaaaaagagcactaaacttacccaagaatgtgctaaaaagaagaaaggagtgttaaatcctgcagcaagatggaacacaggagctagcctccccaagctgcaataaatctggtttttgttcccacctgccaccgccccctgtgccagactagttgtcaaggtctctgtagagggtcctgagaatggaagcggagtggatgtccccaggagggtgagcagtgctccatcacttcaccagccttcccctccatggcaagtgcagaggcatctcaggaataaaggatgccatgggccagtgtttgaaaaatgcataaacaaggttaaatattctttactgtagtgcttctcagagtctttaatatgtaactatgaaacaggaagggacttatagtggttactgtttttaggcattggaattctttgggctgagaggatgctcgggacaatatcatagtggtgtttcttagaacatccttgggaagtgctgcccctagtctcttgtcctttggcccatgacaagtgcttccctgcatcccacacccacacatgccaactgtgttccctctgcctgcaatgttccacttctaggtttcaacatagcttcttccctttctgttcattcagctctcagctcagatgaccctcctcatagaggtcctccctgaccacttgaccctctcactctctatcccaaagcatgtatcattatttgaaatgtttagaattgtctaaattggttacatctttattgtctgtttctcctattagaaggaaagttcaggccaggcgtggcagctcacatttgtaatcccagcactctgggaggccgaggcaggcagatcatgaggtcaagagatagaaaccatcctggccaacatggtgaaaccctatctctactaaaaatacaaaaattagctgggcgtggtggtgcatgcctatagtcccacctactcgggaggctgaggcaggagaatcgcttgaacccgggaagcagaggttgcaatgagccgagatcacgccactgcattccagtctggcaacagagtgagactccctctcaaaaaaaaaaaaaaaaaaaaaaaagaaggaaagttgatatcatgagtgttgctctagccccggcacttagaacagggtctggcacacagttggtgccctgttgaaggaaaaaaatgagtgaacgaacactgaacttcagcctttctattaaacagggtggaagaccatgacgatctcatgccaatatttatgcgctatgacacaattctgaaggaaacttacggtgaatacttcctggccgaactaatagaggcccaagatgaagagaatcatgctgttgtgtgtgaggtcagtgactgattcatgtgggaacacacttagtgagaggaaggagggatgtgagtggtgttgctcttgcgttgctgggcacccctggagctgccattgtctccctggccaccccggccctcccactgcccttccaggtggtgcaccaggccagcttcctcccctgggttactggctttaggttgtcttttgcgaggtccttccagatgcccacgatgctgtagattcttgccttgtccctagagtgagagggaatggaaaagaccccccaggggtgcgtagggggatttctgaggatccccaaatctcagacttcagaagtcacaaaccagcgttctgctggcagatggattttgtttgagttggaaaggtattttttttaactttttgttttgacatagtttcacacttaaagaaagtttataactacccagattccccaaatgttaacatccaaccccatttgttttatcattctcttgttcaacctttctaattccctctctctctctctttttctctcttgctggctctctctctctctctcatgtatattctgaaccatttgagagtaagttgcatacataatgcccctttacctgtaagtatttcaatgtatatttcctaaaaacaaggacactctcttagataactgcaatacaatgatcaaagccaagtaattatgattcctgtaattattattattattattattttttgagatggagccttgctctgtcacccagactggagtgcactgtcatgatctcggctcactgcaacctccgcctctcgggttcaagcaattctcctgcctcagcctccctagtagctgggattacaggtgtgcgccaccacgcccagctaacttttgtatttttagtagagacggggtttcaccatgttggccaggctgacctgaggtgaactcctgacctcaggtgatccgcccgccttggcctcccaaagtgctgggattacaggcgtgagccaccgtgcccagctagttcctgcaattcttttatctaatctacagacttcattcagatttttctgacagtcccaggaatgtcctttatggcagaggtaattccaggccattcattgcattcaggtgctctgtttcttcagcctttttaaatctggaacaattctccgatccgtctttatcttccatgacaattacagttttgaatagtacaggtcagttattttgtagaatgtctccatttggatttgtacaatgttttctcatgatttgattcaagttatatatgattaaatatttttgaattagcagctattgtaaaaattatgaaagtctatgtaaaaattggaatttctagcttttctaaacaaatcagaaggcccagcctattgggcccaaaaggcagcccacaccctctaattcatgattcttcatctactcatttctcattatttgttaaaactgtaagagctgtttaaagaatattacttttcttgaaacttggaatgaaaagttctcttacttggatgacatgagcagtttgaggctttgttctacatcagtggttctcaaacttggcatatatgcagatcacctgggaggcttttaactatccataccatgccaatgacttggatccagaatatatacaaagaactctcacaacaatagaaaaataatccacataaaatgtgggcaaatgattcgaatagacacttttaaaaaaaatgaataaataaaagatacaactggccaataagcacatgaaaagacattcaacatcattagtcattaaggaaaggcaaatcaaaaccacactaagataccactttacctctgctaggagggttataataaaaaagcaggacaatagcagatgttggcaaggatgtggagaaattggaagcctcatccattgctggtaggaatataaaatgctgtggccattttggaaaaagtctggtattttctccaaaagttaaacatttgacccagcaattccatacacagaattgaaaacacatgtccacacagagatgtgtacgcaaatgttcatagcagcattattcataatagccaaaaagtggagacagcccaaatgtctatctactgatgaatagataaacaagatgtggtatatccacacaagggaatagtaccaggaaataaaagagaacgaagcactgatacatgctacagcgtgtatgaaccttgaaaacatgatgctaaagaaaagaagtcagtcataaagaccacgtattgtatgatggcatttagatgaaagcctagaatagacacttctgtagagacagaaggtagattagtgactggagggaaaggggaaggagaagtgactaatattgggcatagtcgttggttggtggggggatgaaaatgttctgggattagacagtggtgatgggtgtacaattttgtgaatatattaaaaaccattgaattgtgtatttcttttttttttttttttttgagacagagtcttgctctgttgcccaggctggagtgcagtgatgtgatcttggctgactgcaacctccacctcccgggttcaagtgattctcctgcctcagcctcccaagtagctgggattacatgcatgtgccaccacaccaggctaatttttgtatttttagtagagatggggttttgccatgttgaccaggctggtctcaaactcttggcctcaagtgatctgcctcccaaagtgttggaattacaggtgtgagccactgcaccaggcatgaattgtgtacttcttgaagggttgtttttatggtaggtgaattatatcaattatatccatttttaaaaatcctgttgcaggggtacactcaggccaattaagtcaatcttttgggggtgagacacaatccatatatttatttttaattttggacactcactatgttgcccaggcttttcttaaactgcagtcctcctgcctcagcctcccaaagtgctacggttacaggcatgagccaccatgcctgacctcaatctggatttttaaagatctccccagatgattccaaggtgcagtccaggtggtgaaacactcatctacatgagggtaaaacatacctggtgagaatgacatgactttatagagatgtgggtattagtttctgaaggtgacaattggcccctggaaattagattctgaagtactacattgaaaggatttttatttattttttaaatgtttattttattttcttatatttaggttttggcatggtttctcaaagacccgctttcacgtattcttgtttagccattagccccaggctaccaggctagccatagaagggagggttggaagcatttgggcccagcagtaccatttggaaagcttgtctttacacaactagacagaaactcctgagaagtgaaatgattcatacagaccccaataaggattttcatgaccaaactttacttatcaggtttaatcagggtctttgtttttggaaggcttttaattatttggttccaaggtactagttttactctgaatcacttgagtcagtgctttgtagagaagctgcagtgacctcttcccccacgttctttctctctcttgccgtatgtttcacactttcagtgtgtgtaaacatcagagcaaagctgtaggctgaaaactgcagttccaaccctgcaagaatcctttggtgtctcgaaagaggcagagggcatccagccccatctccttccagaggccgtgctgcctcaagcatcagaggctttgtgttctgtggaggggagaccacagacctcgatcttaaaatggaagggcagaaacaagactgtgagccgggatctgggaggggacgtctaatctgaagtgagccatgtctgatgtctgaagccttttggggttcaagatcaatgctgttgctaccctttttcctgcctccctagggggcttttaggcaatggtgtgctggagccagcttgctctggctctcaagggctgattgttaaatcctcaggaactctgcaaactgcttgttaaacacagctattattaaaaattaaattatagaaacctacagtgtaataaattatattaaaacaaagttaataaatacttgaaattcatcaccttccatttttttttactattctccatgttcttgagggtttttttttaaatgtctgggtctctatacagtagatataagaaataatggctagctactgcgcattccctcccaactacatgtttagtgagatcacactgttcacttgacattgaccatgatgacagcgcttacacctcagaaatcggcaaatgctacagatctgggcttttcccccgcaaatgctgattaggcatttacaggcacacgttactttaaggcaaccactgtcaaccagaggaaacagaaagaagtccatcaagtttgtctttctgaacagccatggcagttccaggccaggcatgcagcatgcctgagggcaaggctgtgccctgtgggaaacccttactactgaaagggtttttagttacaaggactttctttggcttgatagctagtttggaggagtttggggccatcacttcatacaagttccttgtcataactgtaccctggcttaccttgacatctggtgtttactccaagctgaggttttagggaagggtagttggaggccagcggcggctcctagtgacagatgggcagagcgtctgctttggcatcatccagggtgtgggcagcagtggtccgagtaggcaccactgacctgcaggcagggaaagcctgccaggtcagccatgcgcttggcatcaggaggagaggatcagagccagcagtggtcacaatgagggcaaaaccctcacagtggaatattgtcacccaaaagggatgggtggctgtagggctttttggatggaagcataaatgagaaaatacacacgtttctgtaaatggacctgtttgggaagacaaggccacagtacacatagttttctagcaatctaaaccttatgtgtcatgatgtagatatttacaggacaagcaagaacaacaaaaccttcagttttgttctccagtataagataattgaagacacttgtggtgaaaagtacttctgtcaccaggaagatagataacagccagcaatcaatgcctttctgttgtacaagttaaaaagtccattaaatccatttttttttcagtgcatacacaagaatacatttggatactcctgcaaattcatatttaagaatagtgtttctcaaatcggttatttgaaagaaactcaaaggaaaaagcagacacttccacaatatgtccttgctctgttgtagtctgtaattgtgaacttttgtaaattgttacaaccctggatgaatgatgggaatataacaggttgtagaattggagaacgttaaatctttgttcctaatggcaaaacatgtttttctcattttcatcagaatgtgtgatccatgccatttgaaatcaaattccaaacacaatgagccattagtgtaatagctcattactaacagcggtcttataaataatacattcttatcatacacatgcagctcgctgtgaagccagcaaaaggtatttcaggccatcgaagttttgttgcgccagcgcggctgtagattagaaggacatctccatgtgaaccaagatggatgccaattttccctgccgagagtcaggctggccgtctctttctgcacatatggtagatggattggttaatcagcgtctgctgagtcttgggcctgaaattacagagaagctagacaactgcggctatgcagcctttgttcacgagtgcaaacaagacaaacaatcacttgttatttgggaaaaaaattaaaatgtttattttggacttttattaaagtgtcaatggctttataaaacagctgtgtaaatccaggctttttcagcaagtatcattttagggggcctgtaaagaaaggaatatacatgaaaaaattaatttttaaaaattcccctcatatttcagtattgagaagaaaatagaggaggtctcacttttattttgcaaacacgtttgagaacaaatgatttttaactgggagacatattcgagaacaaatagtagtttaatacctatttttttttttttttttggtgtcatttaaaaaactgagtattattgtagcccgattctctgttttaggagattaaagcattttctctgactgggcatttatggaaagatgctgcgttcttgggaatagagaatgcctgtgattattgagttctgctactttctgaatgcaatggttatctaaaagtctgaacacttgagagataggacccagtaaatgcaggtttctaataagagctatcagagtctaatcagtcaaccagaatttgcttaaaatctactaataattattttatgtgaaatttaaaggactatgtattttctctctctttttaaattttaaatactttccttgcagaaaacaatgaaatacagaattacttaagggatatattaaggagtttcagtcacagccgtctctccatgtggaatatgatagaattaaagtctgttgttaatttctaatgttttggtaccaatcaggtacctggtacccaaccaaggttcagatcagctagttactcatcttctcgcctatgtattactcatcaaagactgaaaatcatggggacgactgcaagagcttcagaaccaggcatttcagggtgatgggaagttcaacatttgcagatcagacccacctggtgaaccagcctagcctgactcaagtttacttcactggaacattttccaccaaacttccttccctcatatctcctccctatcagactatccagttaataaataagtgacttcaagacaaattgaagagtttctacctgataaggagctagggaccgtgaactttctctgtactgggggctgatcagatgggcactggaacaatgacctgtattcctgagaagtgtgcatggcagagggaaagaaagtagacaggagcgccaggcttatggtggggtacaaacacaagacaccaaatggcagaggatatggagcaggcaggagcatggtctgagcagagggcaagtgttccaatggttgaagggtcaagaactctggcaatttccctgttacttatgcaccactaggtgtgtccccagtggtcacttattgggacattttttgagcatgttttatgtactgaaggaagacacttattcctcccttaaatctcaaggtgactgccaaaccaccagccgaccacattctgagggctctggaggtttcctgatgagaatcatttgacctctgataaagtaatgaagtgttttggactgggtgtggtggctcatgcctgtaatcccagcactttgggaggccgaggtgggtggatcacttgaggtcaggagttcaagaccagcctggccaacatggtgaaactccgtctctactaaaaatgcaaaaattagctgggtgtggtggcgggcgcctgcagtcccagctctgcgggaggctggggagaagaattgcttgaactgaggaggcggaggttgcggtgagccaagatacaccactgcactccagcctgggtgacagagcgagactttgtctcaaaaaaaaaaaaaaaaaaagaataatgaggtgttttggatatttcaggtggaaggcacagctgttgggttcatgagtgtgtgctcaagagtgaacatgcaactgctgcatgagtgctttgacttgggccctttccacggactctgtttcccacatcctgatgacgttctggaatcaccacaagacctaagtgtccgaagaagtcaaggtacagtggctatcacagggacacactgggaaattaaatctatgctttatacacattgcgctcttcgctaagtgatggaactagataggatgctttatatttccttccccagttccccttaaggagtagttcccatggttggtcacatccttgtgaaatacctacaagcacagatagtcacagtgcaggggtggagttagacatagtggacttggggccttagggctcccacattcaggatgctcacttcttgaatgttcattgctagagtacatgtaagttatgatgaaataattactggtgtttcaggtttcacacacacacacacacacacacacacaaccaaatacaacaagtgaatttttcaaatcaagaactcaggaaattttttatgcttttaagttttaatcccaactttcagtgcttctgtttttgtctttgacaaatcattatgtagtataggtctgttgcaagtagtcatttttaacttgcttaagttacttctagttatatgaaataataccatcaattttaaaatattgtctgtatcaagattttcaccacgttcaattaggtaacctcaaactttgatgttttaatttagtgaggtcttactgtatccatgggtatctttgcggttacatatttgggttcttacagaagacagatgcagacaggcaagttaccatgggtacatcaattcacttctccaaagctggatttcttcatttgtaaaatgggcataatagtaatacctcccacacggggggggggttgtgaagtttcactgagataagccatgtagagtgctttgcacagtcaacactcaataaatgttgatcatcaccgttagcaattattttttctttgtgtcggccttccaccaacttgaatcttcctagggtaaaatcagggtatttcaaattgctatgctttctcctgtctgaaagattacaccaagattgttcagaaatggggaaaggagcacttggctggtggcaaaggacttgccaatctagacaacagaaggcagtgacttggctaagcttatcccctgaatgcataaaccccgtgcacagtgtctagacctcatctgaacatacacacttatcacagagaacctgcaaagccacagatagaggagtttcccttttgtgctgatgataacaacaccctccccaaaagagatttggggtccttattgtttaatagtgaagccttgcttgccatgcttcccagagaagaactctaccataggagagttctgagggaacttatcagtgtgagacagtctggaaccataagttgtcattgttattttccaatgcttaaattcttctttgaaagcagcactaaatggcctttttttttttttgagatggaatttaactcttgtcacccaggctggagtgcaatggtgtgatcttggctcactgcaacctctgcctccagggttcaagtgattctcctgtctcagcctctggagtagctgggattacaggtgtgcgccaccacgcccagctaatttttgtatttttagtagacacagggtttcaccatgttggccaggctggtcttgaactcctgacctcaggtgatttacctgcctcagcctcccaaagtgctgggattacaggtgtgagccactgcacttggccctaaatagcctttttatggctgaatattctcacatgtaaaatggagataaaaatagtatctaacccaaagaattgaggggacaattaaatgttagaatctatgtgttgtgcttagctcagcgccaaacacaaagtaagtcctgaacatttaaaaatattttttcccctgtggctgttgtaatgaagaacaagttgaaaagatgtagtcccttccagtgtgtttctgagtggctctgatgctactgtttcctacatagaatgaatggaaaattccttagaaactttatggggcagtgaaattcaaaatttaaactgaaccctggacttaaaaacatacgtaagctagtatatctctagcaagagcccacagagatatgggcactaaaagaagtcctacttctgtttacctccttcaatatttttacctaaaataagtcaatctaggacagatggtaagtaaaagaaataggaaaacttatcttctgtgccttgtttatttttgaaagtcagctttatgttcattgacacaaagatgattccttatgaaattttcaccagggagctggcattgtagacttccacataacttccagggattgagtcacaaatcatcaacagctcattatatctaagaaaagagtcatcagcacattttgctgccatcttcctatcaacaacaacaaagaatgaggctccagagaaaattctaaatgtactgtgatctgttactttcctttcctgatgaaagtctcaagttaaaggaaatataatttctctaaaatatgaactaaaattcttgtttcaaatgagcacacatcactgtgtctcatatcttgtattttgtttagtgcttttttccatttcaaaggatttttatatatgtaatctcatgttatcctataacttggtgtaggagagctagggaaggtgaggttctctccattttttacttgctaaagctcatccaagcttttaaagctcatcagtggctgacccagaaggcagacccagcctctctctgctttcgtgcatgatgatagtcttggcaaggtaacgtcttatcttggatggttttgacagaaaactccaatgacgggtctgctacacaagatacatgatgagttttttcactttatttttattttttatttttattattgttatttttttgagatgaaggcccccctctgtcacccaggttggagtacagtggtgcaatctcagctcattgcaacctctgcctcccgggttcaggtgagtctcctgcctcagcctccccagtagctgagattacatgtgtgtgccaccacacccagctaattttttttgtatttttagtagagacagagttcatcatgttggccaggctggtcttgaactccgggcctcaggtgatccgcccacctcggcttcccaaagtgctgggattacaggagtaagccaccatgcccggccagttttttcactttaataagttatttaatgaatgatcacttcagtgggtgatcagtgacctgcccatatccctccgacttttattttgtatgtgtgtgctccaaacaactcctatctgctggaatcttcacctctgtgtctgcaggcttttttaaaactgtgaaaggccactctgacctatgcaggggtcaggctggaagtgtcaggaaattatcactcaaggaatagactctgtttccctatgtcacatcccagcttccctgctggtgctttctccattgactcccaaataaatggttgtaactgaatctttaacttaagatttgcctctgaggcaagtgagaccaagacactactagttaggtcttttcctaccagctgtgaaagcatttatttatacacagctgacttgggtgagagtataaataccccagctccctcactcctcaggtgggaggactcagatatgtgagtattggctggtttcccagagttcccccaagggattaagtttcagttgtccataatagtaatctgggtgataacacatgtgttgttgttttttaacttttaagttcaggggtacatgagaaggtttgttacataggtaaacttgtgtcatgtgggtttgttgtacagattatggcatcacccaggtattaagcctagtacccattagttacttttcctgatcctctccctcctcccaccctccaccctcaaaaggccccagtgtgtgttgttcccctttatgtgtccatggacaacacacattttattagttgcctttccttccctgtctctttcctcactctcctactggtacatcctggaaccacctccaaaataaactgcttattctcaagctcttctctcaagatctgatctttccctgccagctgtgaaaacttgcaatttcacaccaacctcaaccctttcaagcagaataatgtcaagactcagcattcttaaatgaatccagaggccctcctttttctagctcctaatacacatggtaattagcttactgtccttcatcatctcagccttatcaaaagtttccctggaggtctggctggtgttaacagaaaggagggcagagctggtgtggctgaccatggagaaagctgacttggctggtgtggtgcagagaagccagcttgtttatgtgcttattccatgactgcttgtcctgagcagaaagtgcttttcaggatctatttttggaggtttattaagtatgttctcaattccaacagtttaatgaagatctaaataaaatgctaggttctaccttaaaaaaaaagtttccctgaatctaaaatgtttaactgtgtacaatcaatttgtgttttacctgaataatttgtgtatgttttcatagctacccattttgcatgtataacctattacatacttgtaaactttggtttttatgtactaaacattgggagtaaactgggaccaatgggaataggttctaaggatgtaaattttgtccaagcataaggaaaaactagtagaagtgtattttttttatttaatggaggacctagtgtggaagtagcaagttcccagaatattggaagaattcataaagaaacagtcatacacacttacaaagggctttctgcttgtgtggaagattatactgaatgagatgtaagatccccttaaatgctaaaaaaaacttattgaatacatatcaagatgttccatatgcctggcactttatgaatattttccttcagtgacaataaaatggttcaaaacaatattttttccagttggccgcagcactggccctgcctggtgtttgcaaatcaagctgtgtcttttgttagctgcatcacccaataaatattttggaatcaagcttgagctggcaattttcttgataatgcataaggcaaaatagggcacaacctgcatttccacagctgtactggcattgccgcatttaatagttaaaataaaaaaataaaaacaagcaaaaaacaaaacttttgttcctcatgtaggccgttgagatctgggcagcatgaatctctgttttaaaagactcctgcaaggttccgatttgtaaatctcattatatacccagggcccaccttacaaagtctctgcagaacttgatgtgctccttggcagggagagatttcactttacataatagagttatgggcattcaaaagaataactagtgtagccccttgtcaccaagtcatccaggaaaactgttgctcactatacatataaaagacccttcaaaatagaatttttgtaatgtctccacgtaaaacatcgcaatattgcctttaactttttttttttaaattactcctgctgtcaggaaatgtctttatatgtcttatttcaattttatgtcttgttttattgaactcacatttgcttcttatctcagattccctcatctcttgggttaggaaacacctagacccactctccctgtgtcggagctaaaaaacaatggctacattaagtcttattgattgtgtattaaatcatcccaggtcttttcgcctctcttcctaaggttccattttatattcctggattcccttctattttactttattcttcttttaacatggattccaaacaggactggagcacgtatctacagggtgtgttaggatttctgctgccgtctttacattacagatctcggaaccttgtttttaacagtcagttcattctgtagttaaccagtgacccaccaggacttagtctgccagggctgccataacaaagtgccacagactgggtggcttaaaaaacagaaattgattttctcacatttgtgaggccagaagtcaagatgttggaggggtcagtttcttttgaggcctccctccttgacttgtagacggccatcttctccccatgtcttcacagggtcttccctctgtgcccatcagtgtttttggtttttctttttataaggacaccagtcacaatgcattagggctcacctgtaactttaactcagttacctctttaaagactgtctgcaaatacagtcccattctgaggtactaggggttaagccttcagtgtacgagttttgggggtgggaggaggcacactacagcccaggagaggctctatggtatcgtactgccttcctctggtccctaataggggggcggtatgtgttcagggtggggaatgtttggatgtctacatcctctcataagcccatgttcttcccctggctggatgtaagccgcacccacccaaccttctgtgcccgaggaaagtccctgtgtcccaccaatgggcttctcattgttcctggcatgggtttcagatccccctaggagaggagttctgttcttacaggcttctgtgccctggtcacctccacttcccaggaggctagggtgagttctggggcccattatagctctcactcagtggccacacagcaatattactcacttggtagcagttgccaccaaatttgccattttctcattgtgatctgggctttgagcatctcagttctccctcctccccttttctttccttctcctagatcctgtggtgtggttctttgatgcctgtactcaaggctctgatagtaatgcagacagtggcagcaaagtcggctttacttaatgttcatacatagccctaatatactaacttatacttgttaaaatttgaattatttatttatttatttttattgttttgagacggagtctcgctctgtcgcccaggctggagtgcagtggtgcaatctcggctcactgaaagctccgcctcccaggttcacaccattctcctgcctcagcctcccgagtagctgggactacaggcgcctgccaccatgcccggctaatttttttgagttttttttttttagtagagatggggtttcactgtgttagccaggatggtctcgatctcctgaccttgtgatccgcccacctcagcctcccaaagtgctgggattacaggcatgatgaatttcatttttttaagccactgaatgtctttagcatatgaaggcaacatcttcgaaagctttagctactcttgcctatatatatatatatatatatatatatatatatatatatatatatatataaaatttgattttctagaatctactttgttaattctaaagctttgcaagagatgttgataaaacaaataaatcataccagacctatacccaggcatctccaatgttgagagtttagactctttcagggctttcagggcagagcccctggactggtaggataccaggaagactgtaatccagacctgaagcccagaacttgttgtcagggacatgaccccaaagccatcttggtgagccttttggttatttcataaaacctgttgtcaattctccatcttaattccaaagctgatttctaagccttttctaatgtcttcaaaaacaaccatagcatcaaaggatggcaaccacttaagaatctattattttgcagacagcaacatgactgagatctgcattcctcctttcctcttcagccctgggagcgacctgtgatatcacagccttgttctccaacagtcagattcatttcacaatggtggaaatacaagcgcatttttgtatggggcctggaggtcttcagaagaaaagtggctttatttatattcgttatgatcattatgtgctgggattattttctcagtaggggatgtctcttttgcccatatttatgaagcaggggagaaggcatttaatgaagttcaagagtgtatttgactgtaaaacacatctcagtacattcacatgtaaataacccttttatttgttctctctggtgacctttttcctgttggggtagatcacagtttgttgttgttttccattttcagatggaaggctgaaagataataacgaaagattatgcaaaaaaaatccgtgtttaaaataatgttgatatgccacttgtgttgcaggataattatagtaatttggctattacgctatatggagtcagcagttagttgctagaaaacacggtgataggggtgattcaagggattttcatcccaactgggtgtttgatcctgctgacttttctcttgaaaatcaattgcttgcactgaatactttgaattcccccttgattaaattggccatcagtgggtcacacccattgcactgaggtcactgtgagttctgtttacaaagagtttttgatgattcttaaaatatcatggaccaaatttaatctgagccaagcggctaaggaagcaattactgaaaagcacagtttttgcacatggcaacaaacaaaggaaaatttattaattctgaagctcaacatgaagccagttatttgactactgggtcagaggccttctctccactgcattttgcttggactttcggtattttcagacctccatggacagataggctcactcagtagaagacctggtagaggcatcttggaagcatctttgacaacttttccatttctcctcaaggtagttaatagattcaggttttctatttcctttgaatcaattttggaaataagattattctagaaaagcttaatttagtatatgaagatgaaaaattagcatacagtagtggagatatatataggagtatatgtataatatatgtgtgtatatatgtatccaactctgtggaaaaatacttaaaaaaattttttttctttttttcagagacaaggtctcattttgttgcccaggctggggtacagtggtgcaagtatggctcactgcagccttgaactctttctgggctcaagtgatcctcctacttcagcttcctgagtagctggactataggtatgtgccaccataccttgctaatttttacatttttttggagacagggtttcgttttgttgccaggctggtcttgaattcctggctttaagcaatcttcctgccttggcctcccaaagtgctggaattgcagggatgagcaaccacacccagcctgtcttttttattgagtactgatttaagtctacatgaaatattctaaaataaagagaaaagcaaatcacaaaagtagttatataaaaatattattcataataaatgtgggaaaatattaaacttccctaaaactgaaatgcacattaaaacccaagatctttttctcccccattttgcctactaaattgtaaatatgcattgtaattaaaacacttagctctgggcaagaagcactgtaatgagcactcagattttctgatgctctgaaggttgactgatataacattctggagtacaatttagtcatggttatcacagaatgcattagatgttcatgttctttgacttcaactatagcaaatttgaggaaataatactaatactataaaaagatccatatgcaagaatttcactaagcttaatcataatactaaaaatgaacaaacaaaaaatatccaaataaacaaatgtaaaaaccccaagtctcccacaaggagatggctaaacttgtgaatatcccttagatagatatgcagaagcctttaagaagaaggttacaaatagtgaggggaaatggttcagatataatctcaggtgaaaaaaaaatcaatgcaaaatgaattgcagtatcagtaaagtcacctaataaaacacatgttatgaagagtacagggaggcaatgaactaaaatgacaaaagggctggagtcatagaagtggcaatagagcaacgcttttatttcctccctatattttttaaaatgtggaaactattaaatctacagaaaagttgcagatacgtttttttcttcctaatccatgtcaacgtaagttgccaacatgaagttgttggagcaccttggaatacttttgtatgtatttgctataaagagggacattctcctttgcaacctcaaacatccactgatatcaggaaattaacatgaatatgttactacaatttaatccacaatccaaagacaccagttacatttcttcatttgtcctgaggatgtcctttgtggcaaaagaatccagtccaggataacaaactgcagttacttgtcatattgtctttcaatgtggaacagttgctcagtctttccctgctttttatgacctagcccataattttgtagaacgtaatttatttttgtttgtttgatgtttattcatggtgagagtcatgtcatgcatgtggaactctgggctctcagtccatcctatctggtgtgatacattttcagtctgccctgttactgatgatgatgtgtgtcactttgatcacttgactaaagtgactcttttaggtaaaaattaaaattattttcacttatcccagtctgtgcagaagtctgtaataatgtctttcttcctgaactctgtattagctctaccctgattttcacttggaatcaactgatcctgttttactccttgcttggggtttcatctttgcaccacccagcatcccaccacaggtacttgaggctgttgagctctccttgggtaaatgatgctcttggttgttccatacgtcagtccttctatgcttgagctggtgtcagcctctggtaattgctgtgcgtggtccatttcaggcagatggctcctgacttactttgtagccagaatagacttcagcaaggcagactcccttccccctctaactagggtgctcacaaacgacatggacccagctcccaagtgctcggtctaaagctttacctacaatttattctctcctgtagctgtgattatatctctttcttcttaaagtcatctttgctttttactctgtcttgtcttttaattaggttttcctgtttggtcttttcaaagagctagctcttaatctatcaagtctatgggtttctttttgaatttattaatatctgctttcattttgtgacctctttctcctgatttctttgaatgtgttttgttcttcctattctaattgtctaattgcctgattcattcttttttttttttttgagacggagtctcgctcttgttgcccaggctggagtgcaatggcgcaatctcggctcactgcaacctccgcctcccaggttcaagtgattctcctgtctcagcctccctagtagctgggatcgcaggcatgcactaccatgcctggctaatttttggtatttttagtagagacggggtttcaccgtgttggccaggctggtctcgaactcctaacctcaggtgatccacttgcctaggcttccttgttttaaaataaaagcacttcttgggaagacaaagttttgctctaccaacttaggtccaagcgggtgggggcctgcaaattgaccaacagattaacaggagaaaaaagtattatatataaaataatatataatactatgtataaactggtttggtggttgttaagctcttcatttcccccatttgaaacttctcaaaaacattcacaaacaaggagcagggttgattgctatggagagaagactagggctacaagttccaaggaaagaaatctgcaaaaggagacagcaacatagattagaatgcggaaacaaaaataaaaatcaagattaatatctggagcaactatcaacctagtttctgagaccaaagggcatccagtcaaaaagacttttaaacattgggtttgaagcgtttctagacaggggagtgagcatggtattggcaaactgacagatttcccagtttgcagtttgaaggttgttggtgatggcgtagatagcaaatcactataaccacggtcatggctgtttcctggagcgcagcatagaagatgagtgttatagtgagcttcctgagtggcccacacagcagcagctccaagcacgaggcccatactcacacttgatctattgtgatgatgactattttgaagttcatgtcaagccatctagcttcagctcacagggcttcttaagaccttggagggaaaggggcaaaacaagacaacctagagtctcaaggttccgggcagtcagatttttcagtgatgccaagtcaggaggatgggagaaaatttggaaacattaattactggcaacatgtgtaagatagcaggattcagtttacaaaaaggtagaaatggctcagaggtaatgagcaggattagaatctgataactcacatgagcagattatagttttccattgaaatatagaatttataatcaccccaattttgatcaaagataataaaattaatattattttgtttgtaaaataaatctagtttcattaaatttggtttgattatttatatgaatacttcaaaaatggtaacagaccacattaaagtttgctttgctgaactgagattaggaatctcaaactggacttttaaaagcctgctgggactaggaagtcaggccaagaacttgctaccggatttcacctataatgcctatagatttggatggattccttttctcaaggtcccccaaatatcctaagattcctgggcctgccgggaagtagccttactaactcacctccaaggctgggaaccctgaatgcaggcaccagtatgctttttccaagagggctttgtaagcataggctccataaagtcaaccttatttccttaaagctatcattctcaaatgacattccaatctaatccttggtcataaccagttatgtcttgttacaaggaggacagattctcattgaaactatgcaaacaactatattgccatgaaaatggggacactcaataagagttttggaactctggagggatcaggcagggagaaaaataagatatttcatttctgtttacaaaagcataatgtacgaaattgttgtaagttatagatagctcacaaagaaaagagagacgggttccttaaatccaggataaaattttaaacaaagccataattttattcatcagttcatttagtccaatgtaattaattcttgttctgcttgatctaaggttagtagttttttatgaatcccccagcttctccactagagttttggaatatatgatataatctcaaagttatttatgcaataccttcagaagcctgcaccctagagtacttggcatattccttttccatgggtttccttttgttgaaaacaagtattatagcttattatagcttctagaaaaacttcagaataaaacaataactatccaggataagaagagacttaaatggtgtgattaatgatctgatgagagttcactataaaaatagcaaaattgatgaggaaatttggttgtttctgtggcatagaacttctaaaataaaaactggaattatgactataatattatgctattgttgtctaatatcaggcaaagcaataccagcacacatcatagcgtgggcattgacaaatttctaggaacttcatatacttcctgaaatatttatattcataacatttacataaaatatgtgtaaaaatataaccttgggaaagttatctcttcttacttgacaaagcttttcatgcatttcaacatatctaattttattttattttattttttcatttttccatcactccctatcctaattaatttttgatatctctttttttaataaggtaaaataacaaatcctttgagattttccaggggctttctggaaagtcaggaatttatagcagctgaacttgaacttccaggataaaagggtcatcattcttctcccacactgtaaactcctttgtgggggtgagggagtcaatggaagccgtattttcaggaggctctgcttaagtttaatgtttctttctgtggctgctgattgttcgaatgttttcagtttaaaataatcttcaaccattttggtgggctgttcatcacttcacatttaaagccatgcatcttccactcagtattgccttgtctttatcccataagctattaccaagtgatattgatattaacatccttattctcattgtagttattttatgaatatctgtggttgtgattttaatcttctcttttatctgaaattttttagggaagtggtttgattttcattgggtgtgattattgtgtgtgcttgtcctcttgtctttaatttctaaatttttgcattgtggttagaaaatatgacctgtgtaatttctacttttgttttaaattaagatcttttattacagcctcatataggatcagtttcatagatgtccatggactttcaaagagaatgtgcattctctgtttataaggctcaaacttatgtatagtgtggttaaatatagcttactatgatattcaaatcttccataacttcattattgttgacatggtctatcttattctgagaaagtaaaatttcccagttcactgtggtcttatcttctccacttatcactgcatttgtaaaacttttgctttatgtatttagatactgtgctctttggtacctgcagtttcatgacaatgaggttatacttgtggatatcttttatcaatacaaaataagtatcttcgctccatctaatatgtttagctttgaattacatttaatctgatataatatttccattcctaggcccacactgtaccacaataaattttatagtgaagtgttctaagcaatgtcctccaagtcttgggcatagataattttgacatgggacaatgaagaatggatcttagacaactttactcaagtctcctgccccatgttgttttgccttttacatttagatctaccacccacacgtaatcgattttcacatatggtgtgatatagaaatcacattttatttttaaaaatatgaatatccaattgactaagtaccatttattgaaaaggtcattctttccccctattgcagtaccacctgtgtcacagattaaatgtccatatatgtgtacatttgttttgggattctctgttctatttgtcaacaatacactgtcttaattaccatagacttatgataaatcttgatactggcagagtaagtctttccaccttgttttttaagattatcctttttattcttagttgtctaatttttccacataaacatgagagctcaaaaaaaaaaaaaaaaaaaagcctgggtgccatggctcatgcctgtaattccagcactctgggaggccaaggcaggcagattgctagagctgaggagttcgagaccaccctgggcaacatggtgaaatcctgtctctacaaaaagtgcaaaaaattagccaggcatggtgacatgtgcctgtggtcccagctactcaggaggctgaggtgggaggatcacctaaccctgggaggtggaggttgcagtgagccaagatcacaccactgcactccagcctgagcagcagagtgaggccctgtctctaaaattaaattaaattttaaaataatcattttggggatcttgaatgggattgcttcaaatttatagatcagtttgctagtggggaaactgacatttttataatatattaagcctcctaatctctgaatgtggtatagcccacaatttatttattgaaggataattaagtgtcttagtttcctcctataatgttttatagatttttatagagaggcttcgcatatctgttgttagatttattcctagatatttgatatttttacactattgtaaatatcttttaaaaatcatttttcaaattgttcatggctgttatgttgtagtggaatgggcttttgtatattgattgaccttatgtctggcaacctttctacacagacttactaattctaagatttatctgtatattattttgtatttctctatataatgtaaatttttgttctttactttccaaactttataatttaaatttgtttatctactggctaataccttaaatagaaatggcattaacaggcatccttttgttgatctcagaattaactgaaaagttttcagtatttcatcattaaggataactttgtgaatactcattatcaggtcaaggaagtgtctgtatttctgatttgctaagagttttattaggaatggtttgtttgttttaattgaattgaattttataaaatgtttttttctgtgtttcctgaaatgatcatatgattcttctctattctgttgaagagatgaattacattgattgacttttttatgtatttattttgttaatttcaatttagtcttgatatacaattctttatatgcagtgctggattttgtttgctaatgttttgtttaggatttttgcacctatattcatgagtgagattggcctgcaactttcacttcttgaaatgtccttccttgccagactttggaaatgaagtcatgctggtctcataaaacaagttgaagagtattctctcttctattcatttcaagtttattactgagtttattttaaaagttagtttattacttccaaagaatagaagagaaatacttttaaagtacatgtgataatatattcatataatttctaaagatcaaatcagtgtaattgggatattcatcaccttaaatatttgtctcttctttgtgctggaaacattgaaattattctcttctagctattttgaaatatataatagattattataaactataggcaccctattgagctatcaaacactaggtcttatttcttctattaaattatatatttctacccattacaaattttcctctcctccccaccccactccactgttcttcctggtctctggtaaccaccaatctactctccaccttcatagatccatttttttagctcccatatatgagtgagaatatgtgatatttgtctttctatgcttagcttatttcacttagcataatgggggcatccaattctatccatgttgttgcaaatgacaggattttactttttaatggctgaacaatattcgattgtgtatatataccacatttgctttatccattcatccattgatggagacttagcttgattccatattttggctattgcgaatagtgctgcaataaacatggaagtgcagatagctcttcagtgtactgatttgatttcttttgaatatatacctagcactgagattgctggatcatatggtagttgtagttttttagttttttgaggaaactccatatagttttccatagtgattgtactaatttacattcctacaaacatatgtatatgtttgggttccccttctctacattctcaccatcatctgatacttttttgataagcaccattttaactgggatgagatgttatctcattgtggttttgatttgcatctctgtgatgattagtgatgttgagcattttttcatgtacctgttgtccattcatatgtcttcttttgagaaatgtctattcagatcttttgtccatttttaatgagtttttttgctattgaattatttgagctccttatattctggttattaaacccttgtcagatgggtagttagcaaataatttctcccatcctgtggattgtcttttcactttgttgattgtctcctttgccgcgcagaaactttttaactcgacgtaatgccgcttttgtctatttttgctttggttgcctgtgcttttgaggtcttacacaaaaaatccttgtccagaccaatgtcctggagtgtttccccaatgttttcttctagtagtttcattgtgtcaggtcttagatttaagattttcatccatttttattttatttttgtgtatggtgagaggtagggatctagtttcattcttctacatggttgtaaactgtagtcaccctactgatctatcaaacactgggtcatacttcttctattaaactgtatgtttgtacccatcaatcaacttctctttctctcccccacccctctactcttcctgacctctagtaaccagcagtctattctctatcttcatgagatccacttttttagtttccacatgtgagtgagaacatttgatacttgttttttttcacatttgttatactcctgggctgaagtgatatataggtatgtaacactgtgcccagatggtgaataatatttttaatgtgttgttgaatttggcttgctagtattttgctgaggacttttgtatccagttttcccagcaccatttattgatgagactttcctttccccgctttgttattgatgccttcgtcaaaaataaattggctgtagccaggcacagtggctcacacctgtaattccagcacttttggaggccgaggtgggtggatcacttgagttcaggagttcgagaccagcctggtgaacatggttctactaaaaatacaaaattagccaggtatagtggcacacgcctgtagtaccagctacttgggaggctgaggcaggacaatcacttgaaaccagagggtggatattgcagtgagttgagatcgtgccactgcactccagcctgggcaacagagtgagactccatctcaaaaaataaattaataagttaaaaataaataaataaataaataaataggctataaatgcatggatttatgtctgagttctctattctgttccattggtctatgtgtctgctttttacaccagtaccatgctaatttggttactatctctttgtagtacattttaaagtcaggtagtgtgatgcctctagctttgttctttttgcttatgattgctttgggtattcagggtctttgtggttttgtataaattttagcattgttttttctgtttctatgaagaatgtcattagtattttgataagcctttctttgaatctataaattgctttgggtattactgtcgttttaacgatattcttctaatgcatgaccatggattatctttccatttttgtatgtatgtgtcctcttcaattttttttatcagtgtgttttagttttcctaatataggtctttcatttctttggtgaaattgattcctaggtattttatattttttatagctattgtaaatgggattgctttcttgatctctttttcagattgtttactgttggtgataaaatactactgatttttgtattttagttttgtatcctgcaactttactgaatttatttattagttctgacagatttttggtggggtctttaggtttttctaagtataagatcacgttgtctgtgaacaaaacaaatttgacatcttccttttcaatttggatgccctttctttctcttgcctaattcttctgtccagaattcctagtattatgttgaataaaagtgatgaaagtgtgcatccttgtcttgttctagatcttagaggaaagtcttgcaactttttttcatttagtatgatgttagctgtgagtttgtcatatatggtcttcattattttgaggtatgtttctttctttctttctttctttctttctttctttctttctttctttctttcttttctttctttctgtctctctctctgtctttcttcttcttttttttttttttaaacagggtttcacccttgttgcccagactggagtgcaatggcatggtctcggttcactaacacctccacctcccaggttcaagcagttctcctgcttcagcctcccaagtagctgggattacaggtgcctgccaccactcctggctaatttttgtatttttagtagagatggggtttcaccatgttggccaggttggtctcgaactcctgacctcaggtgatctgcccgccttggcttcccaaagtgctgggattacaggtgtgaaccactgtgcccagtgttttgaggtatgttccttctgtactcattttgttgaaggtttttatcataaagggatgctgacttttattgcatgctttttcagcatctcttgaaatgatcacatagtttttgttcttggttttgttaatgggatgtatcacatttattgatttgtgtacattgaaccatccttgcatccctgaaatgaatcccatttgatcttggggaataatttttttttttttgagacagaattttgcaatgtttcccaggttggtcttgaactcttgagctcaagtgatccccctggctcagtctcccagtagctgatactgtaggtatgtaacattgtgcccgactggtgaatgatatctttaatgtgttatggaatttggtttgctagtgttttgttgaaatttttgtgtctatgttcttcagtggtattggcctgtagttttctttttttgttctgttcttatctggttttgatattacagtaatgctgtcctcatacaatgagtttagaagtattccctcctcttcaatttttttgaagagttacagtaaaattagtattcgttctttaaatgtttggtagaattcatagtgaaaccatcaggtcctgggcttttccttgatcgtagactttttattatggcttcgattttgttattcattattggtttgttgaagttttctatttctttgttgttcaatcttggtaggttgtatagtcaaggaatttatcaattttctctaggttttccaatttgttggtgtgtaattgttcataatattctcgaatgatcctttgtatttttgtggtcttagttgttatatttccttgtatgtttctgattttatttgagtcttttctctctttttcttagtctagctaaaggtttgtctatttttgtacctttcaaaaaccaatttttcattttgtctatcttctatattttttggtctcaatttcatttatttctactctgatctttgttttggctatgaagaaatgatttttttttaaacttttaagttcaggggtacatgtgtaggtttgttacataggtaaactcatgtcatgggggtttgttggacagcttatttcatcacccaggtattaagccagtacccatgagttatttttcctgatcccttccctccttttaccctccaccatccagtaggccccactgtctgttgttcccctgtatgtgtccatgtgttctcatcatttagctcccacttatgagtgagaacatggagtatttggttttctgttcctatgtttgtttggtaaggataacggcatccagctccatgttcctgcaaaggctgcatagtattccatggtgtatatgtatcacattgtctttatccagtctaccattgatgggcatttaggttgagtttatgtctttgcttttatgaatagtgcttcagtgaatatactgtgcatgtgtctttatgatagaacaatttatattcctttggttaaatactcagtaatgagatttttgctcccatctttatttcatttcttccactaattttgtgttttgtttgctcttgcttttctagtttcttgaggtacatcgttaagttgtttatttgaagacttcctacttttctgatgtgggcttttattgctatgaactttcctgttagtactgcttttgctgtatctcatggattttggtatgttgtatttccattttcatttgtttcaagaaatttttaaatttccatctgaatttcttcattgactcattgaaaatgattgtttaatttctatgttttgtgtattttttgaggtttctctttttattgatttctagttttattccattgtggtcagaagaaatacttgatatgatttctacttttttgaatttgttgagacttcttttgtggcctaagattctggagaatctattctggagaatgtttcatgtgctgttgaaaacaatgtgtattctgcagcagctggttgaaatgttctgtaaatgtcagttaggtctgtttggtcttgtgtgtagtttaaatctgctgtgtctttgttgattttctgtctagataatctgtctactactgagagtggagtgttgaagcccttactactattacgttgcagtctatctctcccttcacatttattaatatttgctttgtatactcgaatactctagtgttgagttcatagatatttataattgttatatcctgttgatggattgactcctttatcagtatatagtgatcttctttgtcttttttagaagtctttgtagtcaatttcatctgatattaatatagctactactgctcttttttggttttcagttgcatggaatatatttttccacttccattttcagtttatgtgtgtcttaataggtgaaataggtttcttgtaggcagcatatagttgggtcttgcttctttatctattcatttgctctatgtcttttatttttactttttttttttttttttttttgagacagggtctccctctgtcacccaggctggagtgcggtggcaccatctcggctcagtgtagctcgacctttcaggctcaagcaatcctcccacctcaacctcctgagtagctgggactacaggcacatgccactgcaactggctaattttttttttatttttagtagagatggggttttgccacattgtccaggctggtcttgagctcctgaacacaagcaatttgcctgagtcagcctcccaaagtgctgggattataggtgtgagctgccgtgctcaacactctatgtcttttaattagagaattgacttcatttaaattcattgttattaatgataagtaaggattttatttttagtttttaaaatttttaaatatatttttggagacagggtcttgctctgtcactcaggctggagtgcagtggttcaatcttggcacaccacaacctctacctgccaggttcaagtgattctcgtgcctcggcctcccgagtaactggaattacaggcacatgcccctgtgcccagctaatttttgtattttagttgagatggtgtttcgccatgttggccatgctggtcttgaacttctggcctcaagtgatctgcctgcttcagccttccaaaatgctgggattataggtacaagccactgcacctagctgataagtacaggctttcaactgccattttgttgcttattttctggtggttttgtgactcctcttttcctttcttcctttcttactgttgtcctttatggctaagtggttttctctggtagcatgtttgaattcattgcttcttttttttttttaactttttaaaaatttttccgtaagttattcgggtacaggtggtatttggctacatgagtaagttctttagtggtgatttgtgagattttgttgcacccatcacccaggcagtatacattgtactctatttgtagtcttttatccctcatccccctcccagctttccccccaagtccccaaagtccattgtgtcattcttttttgttgttgttgttgttgttgttgagacagagtctcactctgtcacccaggctggagcgcagtggcacaatcttggctcactgcaacctctgcctccctggttcaagtgattctcctgcctcagcctctcccgagcagctgggactacaggggtgcaccaccacacccagctaatttttgtattttttagcagagatggggtttcaccatattggccaggctggtcttgaactgctgacctcgtgatcttcccgcctcagcctcccaaagtgctgggattataggcataagctatcatgcctggcttgtgtcattcttatgcctttgtgttctcatagcttagctcccacatatcagtgaaaacatatgatatctggtttccattcctgagttacttcacttagaataatagtctctaatctcatccaggtagctgcaaatgctgttaattcattcctctttatggctgagtagtattccatcatatatatcacagtttctttttccactcgttgattgatggcaatttgggttggttccatgattttgcaattgcgaattgtgctgctataaacatgtatgtccaagtgtcttttttgtataatgactattttcctctgggtagatccccagtagtgggattgctggatcaaatggtagttctacttttagttcttcaagaaatgtccacaccgttttccatagaggttgtactagtttacattcccaccagcagtgtagaagtgttccctgatcaccacatccacgccaacatctactgttttttttaatatatttttttattatggccattcttgcaggagtaaggtggtgttgcattgtggttttgatttgcatttccctgatcattagtgatgttgagcattttttcatgtttgttggccaattgtatatcttcttttgagaattatctattcatgtccttagctcactttttgatgggattgtttgttttttttcttactgatttgtttgagttcgttgtagattctggatattagtcctttgtcagatgtacagattgtaaagactttctccctctctgtaggttgtctgtttattctgctaaccgttccttttgccatgcaaaagctctttagtttaattaagtcccaactatttatctttgtttttattgcatttgtttttgggtttttggtgatgaaatccttgcctaagccaatgtctagaagggtttttccagtgttatcttctagaatttttatggtttcaggtcttagatttaagagttggtttttccaaggtgagagatgaggatccagtttcattctcctacatgtggccaggcaattatcccagcaccatttgttgataagggtgtcctttccccactttatgtttttgttttgtcaaagatcagttggctgtatttgggtttatttctgggttctctattctgttccattggtctatgtgccgatttttataccagtatcatgctgttttggtgactctcatgctgttttggtggtgtgatgcctccagacttgttctttttgcttagtcttgctttggctatgcgggctcttttttggttccatatgaattttagaattgtattttctaattctgtgaagaatgatggtggtattttgatggggattgcattgaatctgtagattgcttttggcagcatggtcattttcacaaatattgattctacccatccatgagcatgggatgtgtttccatttgtttgtttcatctgtgatttctttcagcagtgttttgtagtttccttgtagaggccttttgccttcttggttatgtatattcctaagttttttttttttttttttttttgcatgctattataaaaggggttgagttcttaatttgattctccacttagttgctgttggtgtataggagagctactgattttgtacattaatcttgtatccagaaggtttgctgaattcttttatcagttctaggagctttttggaagagtctttagggttttcgaggtaaacaatcatctcattggtaaacagtgacagtttgacttcctctttactgatttggatgccctttatttctttctcttgtctgattgctctggttaggacttccagtgctatgttgaagaggagtggtgagagtgggcatccttgtcttgttccaattctcagagggaatgctttcaacttttccccattcaatatcatgttggctgtgggtttgtcatagatagcttttattacattgaggtatgttccttgtatgctgattttgctgacagttttaatcataaagcgatgctggatttcttcaaatgctttttctgcatctattgagatgattgtttgatttttgtttttaattctgtttatgtggtgtatcacatttattgacttgcatatgataagccatccctgcatccctggtatgaaacccactggatcatggtggattatctttttcatatgttgttggatttagttagctagttttttgttaaggattttggcatctatgttcatcaaggatatcagtctgtagttttcttttttggttatgtcctttcctggttcatccatagaatgaattagggagggttccttctttctctatcttgtggaatagtgtcagaaagattggtaccaattcttctttgaacgtctggaagaattctgctgtgaatctgtctggtcctggacttttttttgttggtaatttttaaattaccatttcaacctcactgcttattattggtctatttagggtatctaattcttcctgatttaagctaggagggttttatctttccaggaatttatctatctcttctaggttttctagtttgtgtgtataaaggtgttcatagtagccttgaatgatcttttgtatttcattggtgtcagctgtaatatctcctgtttcatttcttaatgagattatttgaatattctctcttcttttcttggttaatcttgctaatggtctgtcaattttatttatcttttcaaagaaccatcttattgtttcatttatcttttgtattttttttgtttcaatttcatttagttctgctctgttcttggttatttcctttcttctgctgggtttgggtttggtttgttcttctttctctagttccttgagatgtgaccttagaatgtcagtttgtgctctgtcagtctttttgatgtaggtgtttaaggctatgaacttcctcttagcaccacctttgctgtatctcagaggttttgataggttgtatcattattgtctttcagttcaaagaatttttaaatttccgtcttgatttcatttttgatgcaatgctcattcaggagcagtttatttaatttccacatacttgcatggttttgaaggttccttttggaattgatttacagttttattccactgtggtctgagaggctgcttgatgtaatattaattttcttaaatttattgaagcttgttttatggcctatcatggtctatcttggagaaaggtccatgtgctattgaatagaatgtgcattctgtagttgttggatgaaatgttctgtatgtatctgttaagtccatttgttctaagatataggttaaatccattgcttctttgttgactttttgtcttgatgacctgtccagtgctgtcagtggagaactgaagtcccccactattattgtgttgctgtctatctcattgcttaggtctattagtaattagtaaatttgggacctccagtgttaagtgcatatatgtttaggattgtgatatcttcctgctggacaaggccttttaccattatataatgtccctctttgtctcttttaactgctgttgctttaaagtttgttttgtctgatataagagtagctacccctgcttgcttttggtgtccatttgcatgaaatgccttttcccacccctttactttaggtttatgtgggtccttatgtgtgagtctcctgaaggtagcaggtggttggtgagttcttatcaattctccagttctatatgttttaagcggaacatttaggccatttacatttaatgttagtgttgagatgtgaggtaccattacattcgtaatgttatttgttgtctgtgttccttgtttttgtttttgctttttaacatgtatttttgtataggtcctgtgtgatttatactttaaagaggttctgttttgatgtgtttccagtatttgttttaagatttagatctccttttagcagatcttatagtggaggcttagtagtggcgaattctctcagcattcgtttgtctgaaaaagactgtatctttccttcatatctgatgcttagtttctctggatacgaaatccttggctgataattgttttgtttgaggaggctgaagatagggccccaatcccttctagcttatagggtttctgctgagaaatctgctgttagtctgataggttttcctttataggctatctggtacttttgtctcacagctcttaagattctttccttcatcttaactctagataacctgatgacagtttgcctaggcaatgatctttttgtgttgaatttctcaggtgttctttgtgcttcttgtatttggatgtccaggtctctagcaaggctggggaagttttcctcgatttttcccccaaatatgttttccaaacttttagatttctcttcttcctcaggaatactgattattcttaggtttggtcgtttaacataatcccagacttcttggaggctttgttcatattttattattcttttttctttgtttttgttggattgggttaattcgaagatgttgtctttgaactctgaatttctttcttctgcttgttcaattatgttgctgagacttaccagagcattttgcatttctataagtgtgtccaatttttcctgaatgttttattgttttttctttatgttatctatttccttgaatatttctcccttcacttcttgtatcgttttttggatttccttgcattgggcttcgcctttctctggtgcctccctgataagcttaataactaacctcctgaaatctgtttcaggtaaatcagggatttcttcttggtttggatccattgctggtgaactagtgtgattttttggggttgttaaagagccttgttttgtcatattaccagagttggttttctggttccttcttatttgggtaggctctgtcagagggaaagtctagggctgaaggctgttgttcagattctcttgtcccacagggtgttcctttgatatagtactctcccccttttcctatggatgtggcttcctgtgagctgaactacagtgattgttctctctcttctgggtctagccacccagcaagtctacccagctctgggctggtacggggggttgtctggatagagtcctatgatgtgaaccatctgtgggtctctcagccgtggataccagtgcctgttccggtggaggtgacggttggtggtggggtcggggtgggggttgaaatggactctgtgagagtttttagctttggtggtttaatgctctatttttgtgttggttggcctcctgccaggtggtggatggggccctagaactccccaaattatatgctctttgtcttcagctaccagggtgggtagggaaggaccatcaggtagggggcatggctaggcatgtctgagctcagactgtccttgggtgggtcttgctgcagctgctgtgggagatgggggtgaggttcccaggtaagtggagttgtgtacctaggaggattatggctgcctctggtgagtcatgcaggttgtcagggaagttggggaaagctggcagtcacaggcctcacccagctcccatgcaaaccaaagggccagtctcattcccactgtgccccacccagtagtctgtttccatgtgatgggcgagctaggcttgagaacttgccccaggctgcccacctcccagctgagaaagaaaagggcttggttcttcccccttctgtggagactgcacactggattcatgccctctgcccgagttctggccaggaggcttctcaccaccagttcaaattgttacaaacttcagctgaagatttccttctccccgtggtgtttttccccactcctctggccgcccttctgatggatccctgtggtgccaggcaggaatggcctgcctgggaacccagcgagttcccagggcctttcccactgcttcctctacccctatatttcgctcagctctctaaattgactcagctccaggtaaggtcagaaatttctcccacaaacagacctccagtttctgcagtgggggtatgtatttgggagaggaggatctccctttcccactttcacagttggggcactcacagtatttgggctgtctcccgggttctgcaggaggcagtctgcttccttcagagggtctgcgggtcctttcaagattgctggtttgtttttgccattgatctggagctaaaattcacaatgcaagcctctgcacgctgctttatccatccgagttgaagctgcaatctagtcctgcctcccgtccgccatgatgatccaaactattgcttacttttctgctttttatttttagtgtatctatgataggtttttgcattatagttgccatgaggcctatgaaaaacaccttacagaaataacacattatttttaaaagatgacagcttaccttcgatcacaaaaaataaaatcaaagaaaaatctagaaaaaagctctatactttaactccattccccaagattttgacttttggttatctcaatttacatatttttatactatctatctcttaacaagttgttataactattattataattgttataactattattataatagttataactattattgtttttgacagatttttcttttggacttcatactagagttatgaatagattgcactccccaaggacagtattagaatattttgggtttgtccatgtacttaattttaccagtatgttttataccttcagatgtcttctttttgtacaaatcattggtttcattttctttcagattgaagaactccctttcacatttcttgtaagatgggtctgtttgtcgtgaattctctcaagttttgtttatttgggaaagccttttatctttccttcatatttaaaggacaagtttgctggatacagtattctccaaaggaagttttttaatttcagcaattttgaaaatgtcatctcactcccacctgccctgtatggtttctgtgaagaagtctgttgccagatgaattggagctctgtacttgcttcttttcccttgctgcttttaggatcctctctttattcttgacttttgatcagtttattatatgccttgggggagtcttatttgagtcacatctgtttgatgctctctcatcttcctgtacctggatatttatctctttctcaaattttggaaagttttttttttttttaataaactttctacccctattcttgctcaactccttgaacaccaataattcttagatttgtttttttcaggtaattttctgtatcttatagacagtctttgttggttttcattcttttctcttttttgtcctctgattatgtattttcaaatagcctgtctttgagctcactgattctttcctctgcttgatccattctgctcttgagggcctccagtgaatttttcagtttatttgctacattttcagtagcaaatgtatttgtcagttccaagatagccacttgattttttaaattgttatttcaattattttgttaaatttatctgataaatttatgaattgctcttttgtgttatcttaaagatcactgagtagccgggcgcgatggcttacacctgtaatcacaacactttgggaggccaaggcgggcagatcatgaggtcaggagtttgagaccagcctggccaacatggtgaaaccccgtctctactaaagatacaaaaaattagccgggtgtggtggtacgtgcctgtaatcccagctactcaggaggctgaggcaggagaaccacttgaacctgggaggcagaggttgcagtgagctgagatcatgccattgtacttcagcctgggtgacagggcgagactctgtctcagaaataaaaaaaaaagatcactgagtttccttaaaactgctattttgaattcttgatcatagagctcacatattgccgtcttattagggtcagtcactggctccttgctttatcaatttgagaggaccatagttccatgtttcctgatgtttcttgtggtgtgtgtttatgtcttgcattgaaggacagttcaattgaaggacagttgaagttatttgttccattctccctctggcttgttttttattgggatatttgcttatagattctgtgtaatttacctgctgactttcttttttttccccctgctaggtagctgcctcctttttggcactagatggcactttaagcccaggtttgcatcaattctagcaaacagtcagagtgccacccatcctgaatggaggaggtcccaaagggatatcccagtagtgtgggaaggctagctaggggttcatgcccaggggacctgtggaacaaatctcctacagtgtggtgctgctgaactgccatgctaatttggagtctcctttggttgagttacagagcagaatttccatggctgaggatgatagtcccacctccccactttgtttctggctgtgtttagggatatttctttcttcaagtatacctgatgccttccatgagttgaggcaggaaccgatctcctgccagggaacccaagatagtagggaagctggttgtccacctcaatatcagtttgctgtgtagaaactgtgagttgagggaaattttccatacacttgtactgggcagattgggggaaagtgtgtcatagatacagaagtctgattctcttaccatctactcagtttttacacttctctgtggctctaggaactgtctctttctcatatttgagttctgggatattgctggtaataacctgggtgctgtgtatttgtttttgtttttttgtggatggggagggggagtaaagccagcttgcttctacactgccattttggaacctgaagtttttgtgggaaggtttttaattgcagtttataatttaaattgttatatacctatttgttatatttggtagttcataatttttatatgaatatatacattttctttacattttcaaacgcattaggataaagttgaagccattttcatttttctcttattcaacttttaatgttcaaagtagtaatgttgcctttttcagttttcatgatattgagtatttgtgttcattttctcttcttaaacagtcttactggtggtttatcaattttattagtcttttcaaaaaatcaacttttggcttgtttgatccttctctataatttgttaccaagtttatttcttttctttcctttattagttccccttttgtattcctgggcttatttgatgtttttttaatatatatatattttaagtagactcttaactcattgatttttcagcttttcttccatactaatataagtatttaaactataaatatccttctattcttggtcttagctgcaacccacaagttttggtatgtaactaatgtatgtattatcaatatgtttgaaatttcattttatatattctttgacttacgagttatttaaaatattatttatttattaacatgggaatgttcttgtttttttatttttaattgtggtactctttcaacaaatttttaagtgttcaatgcaaaattgttaactataggtagatgttgtacagcagatctctagaactaacttatcttgtgtaaatgaaaggttatacctatttaatagcaactccccattttcccctcttctcaggctcctagcaactaccattctactctctgcttctattaatttcactattttagataccttataaaagtggaattgtgtattatttgttctgtgcctggcttatttcacataacatagtgtcttcaaatttcatccatattgttatatattgcagattttccttccttttaaaagctgaataataatagtctgttgtatatatatatatgccacattttctttatccatccaggatatcctcgttttttgttttgttttgttttttactaggctttagtttaattgcattgcagtcagagaacctactctgtgtgtttttaattcttccaactttgttaagcatatgttccatttttgtaaggattccttgagtccatggaaatagtgtgaatcccataatttttaggttcagtgttctgtataaatcagtcatatttgctaataatgtcatattttatccttattaatattatcacttttttgagcagttcatgagaggtgtgttaaaatctcctgctttgattatggatttattgactcctactcataggctgtctatcatttttttcattatagattttaagtctatgttatttaaggcataatttttaaattattctatcttccttgaaattttgatcagttatgaagtttccttctttagtgatgtttttgtcttgaagtctactttttctgattttaatatggccacatcagctttctttgatttttacttacatgccatatttttttcctgtccttctatttttaccctttctattttcttatattttagatgtgttgcccataaacagcattgagtttggtaggctttgtttttaatctagtgtcataattattgtcttttaattagagtatttagtccatttacatttaatgttcttatgggtttttatctaccatcttactttctacatgtcctctatattcctgtgtttcatttatggtactatttattggtgttttattctttcttactatcaccagtgatatgttaatttaattggcattttcaaagaatcagcctcaagattttgttgattctattacttcttgcaactgcgtcaataatccgttgccacaataatgctactaacaaacagctacaaaactacagtggcataccacaataagcatgtattgttcatgcatttggtgtcaactaggcagctctgctgatcttggctgagtctactcacatgtcttggagtgttttggctgacaggtgatctagtcaggctttggctctgttgcatgtccctctcatcctttaggaggctatcttgtacaggttctcatggagagggcagaggcacaagagagcaaatggaaacatgcaagacctcagaaggtttaggctttgaactaacacatgccacttgtccaagcaggtcacatgattaaacccagaatcagagtgagagggggccacatgaagcaaagggcctaaatacagggaatatgaagaatcagagtcatcattgcaacccatgttcacacacaaaaagaagaatgctgatgacttttgtcatggtcttctttttcctgacctaaggagacacaaacttcagcttaagattggtctcctgatttgtgatacaatgagaatggggaaatggtatctgttttcctggaggaggctaagaccttatcccaagtctcatctcaagatggtgatttgggaattgtcaacgtattaagctcaagtttattgtactggttggcctggagtctacaccacatcccaggtaggaggagtttcactgaaaattttgagaaaagccctttgtcctttcatgcaacccgcctagtatctttctttgtatcactgtggactttattatcaacctcttgtcattcattcagtcattaaacaaatactgagtgcatcccatatactagactttaggaacatagtctagtatgtagtgagtccagtaccagccaatgacaagataaacatgcaagacaaacaactttacaataacatcattgtcttgaaggataaaagagtgtggtgggaccagagcagaattacacctaagtcatcttgagagcatccacatagacttcatagcctccacatagacttcatagacctcaaagcttttgagtaaaacttcaaagcaaattggagctttctaggtgaataagcagaaagattttcctagcagtgatatcaaagagtgtagaataaggagatattcaagaccatggcttattgggggaaagtacaagttcagtgttgctggagcatcaggtgagggagtggcaggagacaaagcaggacaggagaactgaggccaggcaatcaagaccttgcatgccttgcaagagagtttggattctattctattacatcggtcatatgtgatgatgaaccattggaaatatttaattagaatgcattacatgctcagtttctagttcacaggaagactttacaaaggccactatggcgtccaggaaggagatgaggagggattgaaccagaacaataactatggattagatctgggaggtattttagataattaatggaacttgatattttattggatatggggaaaggagattgtggaaaaggggactatcaaggatgatttcagaaactgggtagatggtggaaccattttgtgaggtgagattaataagagtgaatggattatttgatgaagatgctgagatggtaacaatcatttctgatttggacaggtagagagtttgactttcctagtaagcatttgggtaaatacactgcattcagtcagccacaggtgcctattaaagtagacagaaaaatggcctcactaaagacacccttgtataatctctggaacctgtaaatgtcaccttttttttttttgaaaggtctttgtagttgtgattaaagatcttgagataaggagattatcctggattatctaaggtgccctaaatgctatcacaggcatcctgtgataagggagagacagagggagattataaagacagaaaaggaaaaggcaatgtgattatggaatcagattggaatgatgtaacgagccaaggaatgccaaagccaacagaaactggaagaaacaaggaacagattctcccctagagcctctggagtgagcataggcctgctgacaccttgatttcagcccagggatactgatttccaacttcttatctctagaattgtgagagaataaattcctgttgttttaagccactaagtgagtggtaattttttacagcagcaacaggaaactaacacaattatgaagaagacaaaaggaaatgaggccaaccatggcacaaaaacatgtcaagaaataaggacttactcactcttcagaaagaactccttgaaagaattgtctgtgctcaatgttaattttttgctttttgtttttttgtgtatccattgtatgtttttagatttgagggatgaggcttgcaaataatataacccattattttaaactgatgacaacttaacactgattgcataaacaaacaacaactaacaagcaaaaagaaaactaaaaaactacactttatctcctggcttttttgttgtttctatttatatcttactgtactatgtcttgaaacattatagttattatttttgatcttttcatctttctacttatgagtagtttacataccataattacagtgttataatagtctgtgcttttctgtgtatttactgttaccaatgagttttgtatcttcagatgatttcttattgcttattaatgtccttttctctcagattgaagaactccctttaacatttcttgtaggactggtctggtgttgatgaaataccttttgtttgtctaggaaagtctttattactctttcatgtttgaaggatatttttgccagatatactattctagggtaagagtttttcttcttcagcactttaaatatgttatgccactctttcctggcctgcaaggtatccactgaaaagtctgctgccagacgtattggagctgctttgtgtattatttgtttttttttctcttgctgcttttagggtccctttttttacccttgacctttgggagtttgattattaaatgcctcgaggtagtcttctttgggttaaatctacttggtgtttatacttcttagacttgaatattgatatctttctctaggtttgggacgttctctgttactatccccttgaataaacttgtatccctatctctttctccacctcttctttaagggcaataactcttagatttttccctttgaggctattttctagaccctgtaagcatgcttcattcttttttattcttttttcttttgtctcctctgactgttaactttaaaatagcctgttttcaagctcactaattctttcttttgcttagtcaattctgctattaagagactgatacatttttcattatgtcagttgcatttttcaactccagaatttctgcattatttttaaaattatttcaaattatttgttaagtttatctgataggattcgaattccttctccatgctatctagaatttctttgagttttcctcaaatcagctattttgaattctccatctgaaaggtcctacatctctgtctctctgggattggtccctggtgccttatttagttagtctggcgaagtcatgtttttctggttggatctgatgcatgtggatgtttgtcagtgtctgggcactgaagagttagatatttattgtagtctttgcaatctggacttgtttgtacttttccttcttgggaaggctttccaggtattcaaaggaacttggatgttgtgaactaagtttttggtcactgcatctatatctgcattaggtgggtacacagagcccagtaacattttggttcttgcagacttgtagaggtgccaccttggtggtcttggataagatccagaagaatactctggattaccaggcagagactcttattctcttcctttactttctgtcaaacaaatgaagtctctctctctgtgttgagccacctgaagctgggggaggggtgacacaaagcacccttgtggccaccaccactgtgactgcaaagggtcaaaccttaaggcagcacagccatgggtcttgcccaaggcccactgtaaccactacctacattctctcaaggccctagggctctgcaatcagcaggtgatgaagccatccaggcctatgtccttcccttaagggcaacaagttcccctggccctacagaggtccagagatgctgtctgggagccagagccaggagtaggaaaccttagaaatctatctggtgctctgttctactgcagctggcctgactgtgacagcactaggcaaagtactttccgctcttccctccgtttttcccatgcaaaggagtctctccccatgtccaccaccaccacaggcccacagggagtactaccagggtactactgatgttcactaaaggcccaagggctcttctgtcagcttgtggtgaatgctttcaggcctgggactcatccttcagggcagtgggctcttccactggcctatagtaggtccagagatgccattcaagagccaaagcctggaactggggaccctaagagcctgtttggtgctcttccccactgtggccaagctgacacctaagctcaagacaaagtcccctttactctttcctctgcttttctgaagcagaagtggtctcttctcgtagccactacagctgagaatgtgccggtcacacctgaagtcagcacagctcttagtctcacccaaggcccatggcgagtactacctggctactgctgctgattattcagggcccaggggctctttagtcaccacatgatgaatcctactaggactgggtccttcatgtcaaggcagcagcttcccttccagtccagggtgtgtctaggaatgtcatccaggagccagggcctggaatagggaccttgtgactctgccaggtgccctatccaactgtggctgagctgggatccaagttacaagacaaagtcctcttcactcccctctcctcttttcaagtggaaggaaggagtcggagtctcttttggagctgtgagatgcggtgcctgggattaggggaggggtaacgcaagcactcttttagcagatccagctggtgttttactagctcgcatgtcccctaagtccggtagctcagtcctcgtggcctagacagcctttcaagtttatttaggaccccagagcacttttgcctgtggtggcacggcttgccagaactcaggttccaaccagcaggatgggtgattcccatctggctagggctgatgcaaatgctccctcttggggtgccagctgagttctgcctggtgttgacagcactgcattccattgcaaagtcccacagtcactgcactttctctccccaagtgtacagattttccacgccacgtggctactgccaggggaatggggaaaggttagtgttggcaattcaagactgtctttcctgccctcttcagtgcctctttcagtgatatgaagttaaaaccagatagtgtgatcactcccctgatttttggttcttatgaaggtgctttgttgtgtacataattgttaaattttgtgttcctgtggggaggatgattggtggaagcttctatttgatcattttgcttcacttcctctagcactatttattgtacagtttgttctttccccctaacttgaaatgccatcttcatcatatatcaacatttcataactgtctgtgtctatttctggccttcattctgttctattcttgccccagtaactctctgttttaataactatgtctttataatgtcttaatattcagttgggaatttggctctctttttgttcatctttcttaaatttttgtttactgtttctccatatttgctcttttagaatcaatttatttcatcacacaaaaattaagatttttgatggatatttaaaataaatgtaaaaagcacaaaattatattattatttattcctgaagccctcaacatgtattattttgcactccgtatgtattattcctattagataaagagcggggtagatccagagtcttgtgggacctaaagtctgacccattcaagagccctttttaaggagagtaatgcaaaatgatgaatgtggcattagatgctgtgccttggcggagcctgtgctgggaagatgcctgaacctctaagctttattagcttcatggtaaacccgcttcagataagcagtctcacttagagagaaagtcctgacaaattgtgcctttactcccactagagtaaaccaatagttcatgacttctaaactacttagatggtataagccataaaataacaattaaatcgcgcagcttcagttgtatttttagtcatgtgttacacaataccactgcctcagctttccccaggatagcacctcttatttgaggatctcaggggacattatgaacattaagtaattaaacctcgcaagaccccagagacactggagagagagatccagcttcaccttgcccagttctgaaatgcagtcacctctagggatgaacgtggcagctgcttagtaataaactgcaacacctcacgacagtttagtcaagcaattagtctttgtagttggtaactgtctcatgaacattagaccattgacagttaagtcaccaggattattagtttactgaaaatctaatccagtctttaagactttttacttttttgtaatattttcctaattataaaagaagcatgcacagtgaatgtctacttttagttgcattttttgtagttcttcaaacttaaaataggaaagaaatatctttgtaatacattaaaataggtagttactgataatgaggtttttttaattcacaagttttctgctgatcaaaagtaatcaatgatagtaaaagttggaagagtggatacctttgagaggagtattgactggacggggagatgaggggaacctctgggtgctggaaattttttttttttttttttttttttagtgctgtcttgttgcattttttaaaaaattttttattttttattttattattattatactttaagttttagggtacatgtgcacaatgtgcaggtttgttacatatgtatacatatgccatgctggtgtgctgcacccattaactcgtcatttagcattaggtatatctcctaatgctatccctcccacctccccccaccccacaacagtccccagagtgtgatgttccccttcctgtgtccatgtgttctcattgttcatttcccacctatgagtgagaacatgcggtgtttggtttttttgtccttgcgatagtttactgagaatgatgatttccaatttcatccatgtccctacaaaggacatgaactcatccttttttatggcaatcattaaaaagtcaggaaacaacaggtgctggagaggatgtggagaaatatgaacacttttacactgttgatgggactataaactagttcaaccattgtggaagtcagtgtggcaattcctcagggatctagaactagaaataccatttgacccagccatcccattactgggtatatacccaaaggactataatcatgctgctataaagacacatgcacacgtatgcttattgcggcactattcacaatagcaaagacttggaaccaacccaaatgtccaacaatgatagactggattaagaaaatgtggcacatatacaccatggaatactatgcagccataaaaaaggaaatgttttatatgttctttttttttcctttttttttttttgtttttggagatggagtctcactctgtcatctaggctatagtgcagtggcacaatcttgactcactgcaacctccgcctcccaggttcaagtgattctcctgcctctcctgagtagctgggattacaggtgtgcaccaccatgcccggctatgttttttgtattttaagtagagacgaagtttcatcatgttggtcaggctggtcttgaactcctgacctcaggtgatccaactcccttggcctcccaaagtgctgggattacaggtgtgagctactgtgacaagccagttttatatatttttataggcgttggttgttcaggaacagacatatgtagaaattccctgagctgtacacttttcatatgtgtgttaatctcaacaacaaggtcaataagcctaaaaagcatcctgctcttgtcatgatgagagtgctagaaaccccagatagtcttatttggaaaattctgcagggtgcaggacatatcgggagctagagatatgacagtttttattttcctcaaagcatctttcttcagaagagggattctaagtgatttaccctctcttctcaggacattttctcttcatgccaaaagagctacctttcatgctagaatgtgactctctgtctcattgtgccttcaacattatgtacctcttcgactatgccatttacacctccctaggcatctcatttttatcttagaatttcattcatttacctacatctttgccagaagtaagtataatgcattagtgacccagatatttggggttgagaggcatctgcaggggccattgttgtaactggcactagaagaataccatgggagaggaggaagcagaggaccctggctgctctggctctgcagtgtctgatgtgatgcttgaaaacaagaaggcagagcagcatgcccacactcacggagacagcagcagtctctggagccttcagcaggcccagggtccctcctacatctgtggcagcgcttctgaggaggggcagccatgagcagggtgtcctagggctgctctgagctgagtcccaaaggctgagagcagatgtcatggctgagaactcccagcagagcggacaccactgggtgaggcacaaaggagaggacatcctccaatgatgtcttctcccaggtctccctctttaggcatggagagattacaaaagagaaaaaaggaggggaggaggagggtgaaagacctttgtagacaaaatgggaaatttttagtaaaggttaaatacatgaagcctaagctaccctgattattgactttccagaacttactaaaaaaccaatgctcagctccagttcttcttgaaaataatttctattacgaaatagaaaagtgagcattgtgaccgctggcagagcatgagttcacagtatttccacacaaagagaaagcagcccttgtgctaagccttggcattcaggtaacactgatgtaactcactgtggccttttccaccttctgcctggagatcatttcaaagcccaccatcgaggaagctgataacccattgtttgtaaacttcaaaaggggctgctatgaaaggaacccattgcccagggactggcagaggttgagggcctcctgtggcccaggcctgggccaggtccgttgcccatcttcccatctccacaactcccctgggcagcatcatgtgaatgagggcaaagagaggtggagggagggaggaactagcccagaatccctcctcagtgtcaaaattcgggggggctgcggagacctgctcttcccacctcaaggtactgctctctagaataaaattctttagatccattgtagtctaaaaccatgtgaccatgctgtctaatttcctgtgattctgcagatatttatcatctattttctgtcattattctatcccttctctcaaagatgctgagctcaggagtagcagccaaggttcccaaaaaatagtcgaggagttgcaggaacctgtctctccagataccatggaaaacatccaggtgagagagactatccctccatgcctagggtggggggatgggcctgggggctacctgtgacatcaggggcatctctggtgctggcgtcactacggagaagttctaatgcctgatgcagaaaaggcctcactagcagtaagcacaccgcgagctgggggaaacagaggcctctgtgtttgtaacagacaaatcaaagcctcactggtgtgctccaaaattcaggtcagaacagagtgtcagcctttctctaccttcctccctgacttcaggaggctgagacagataaaactgctcatttaaactcactgggaaatacaggctttctgaagagactgacacactatctgcatactccaatgggacagcattttccttactgccctgactggtccctgcagacatggaaacacttgccccatctcccagcaaagtcccctcccagcaaagaggggactcgggagatgtgagtcttttaaagaagattatgtggcatggattagattgatggaaatgaagctgatttaatggaattagttttttttaagtgcagcattctttttacactaaggtgcagtaacggagactggatttactctcctgcctaaaataaccaaagtgtggctaaaatatagaaaacactgttcatcactgtaacaaaggccagcgatgcctgggagatgggaaacaagccaagcgaatcctgtggctgccccagttgtttgccttgacagaccttctaggtcacaacgcagggcaggaagagccagaagacttcccgagtctttaagtccatgcagactagagtgactaaagtctgaaggacagagtactagaaaggacagagtgcacagagagagacatcattgatcagcagatcagtcaggcagtcagctgagtgctgatcacaccaggcatgtgaggaaaccccttaaggccaggctgagaaaagaacctctgaaaaggatgaggattaatagtgcccatgcctgtacaaagttaggaatagtgcctgttctcaccagccagactggaaaagcttatgatttgcaagagagtacacaaaagagtcttgtggagaataattagttctagagagggcaccgctccagtcctgcttaacaaatctttaaagcaagaactaaaagaatcaaagtaacttaactgagtcccagaacaaagtacaagactatctgtaggaatacagaattacttggcacccaccaagatgaaattcacaatgtgtggaatccaataaagaattaccagcactcacaaaactggtaatatattatgcataaggtggagataaatcaatcagttgaaacctacatacatatgaaaacatgttagaattaatggacaaaaacattagaacagttatcataactgtatgttccaaaggttaaggagagacataaaagatataaaaatgccccaaatcaaacttctagagattaaaaactacaatcaatcaagatgaaaaatacaccagaaggattaactccaggttaggcattgcagatgaaagattagtgaacttgaaacaaatataaatgagatgttttttcaagatacgtatcagtgagtttggggacaacttcagagacctaatatatgtgtaatagaagtccacatgaagagagagagacgctaggacagaaaaaaaaaacacattcgaagaaataatgactgaaaaatgataaatttgatgaaaacaatatactcacagatacaagaagctcagcaaacacaagaacataaagaaaactataccaaagccagtggaaaaccagtgataaagagaaaatcttaaaagcagccaggagtagatttgggggaagtcaagttaggaacagagaaacaaagatatgaataacaggggatttcttattggaaataatacaagcagaaagatagtaggatcacatctttaaagaaatagaagaaaataaactccaccctagaattttatacccagtaaatatctttcattcaaaataaaatatgaaataaagagtttgccctacacagaaaaggtggaaaggtgcatcaccagcagacccacattacgagaaatgttaaagaaagccctttaggcagaaggaaaatggtatcagatggaaatttggctctacacaaagagttgaagagcactggaaatggtaacaaagtgggtaaatatataagattttatccttaatatttatatctttttaaaagatagtgacttcacaaacaaaaatagcgccgggtttataacatatgtaaaaataaaatgtatgacaagaatagcacaaagagcttgagaggagacccagaggggaaaagtatactattttaaggttcttatatctaaagtgctataatatcacctaatgacagtctgtgatcagttaaagatgtaccactaatgttataaatcagattcaaagagttatatctaataagcctatagttgagattaaatatcatcataaaaatacaaaattagaccaaaagaagacaaaaagagaggaaaaagggagcaaagactagatgggacaaattacaagatgacagacttaaacctaagtatacaataattacattaaatgtaaacgttccaaatgtcccgattaaagatcatgtatataaggcagatatagagtggataaaatgcaaaattcagttatatgtagactataaaaatgcactttaaatataaagatacaataggctaaatttaaagaatggaaaaggatacaccatgccaacactaatcaaaagttagctggaatggctttactaatttcagacaaagtagattccagaacacagaatactataagagataacaaaggccaagagaatgtaacaatcttaaatacttatgcacccaataacagtgcttcaaaacatacgaagcaaaaagttgtagaactgcaaagataaatcaataaaaattatagttagagatttcaatatgctcctctcaataattgatagaataagtaggcagaaaatcagtaaggataaagaagattttaatgacagtgttgaccagccttgccccacctcctggcctgggtagctgaagtgcagcacagtggccctcagcatcccatcaaatgtgacacactgtgaacaatgtggatcttgtgggctgcagccctggtggctgagggaagtgctctctggatgctgcatatggaaccactgtgttctcagtgtgtagattcacagatagacatgagtgaataataatagaaaatggcatggaacagtgggcatcaatgtcaagatgatactgggtaacaccctacaactggatgaactaatgagtgaagaagagtatgagaaatatgtaaaatccattgaggagtgagaatgggacctctcaataaactagaatgaaacaacttaattcagcatagttgtcttaaattagtaatagatggaagacataaaatagcaacttttggtattaccagtggataaagaaactactcccaacactgctgctggaagaaaataccccttttctaaagatttcagacaaacacaatatgcatctttttcacaatactctatgatttttaggctaggctctagttataatatttagaattcatgaagttttctgtggtgagaactagctgtaaaaattatatatcttgaggataacattatgtcttcagctttatataatattgtaacttgcttatatccattcctggatttgagtcaaaatacttaatgatctttgcattgaaaataatttgggagtggagaaaacttttgttagttgtacaatgtcagatgaagaacaatactgtctttttaagtttcaatagttttggggctaaagtggtttttggttacctggataagttctttagtggtgatttctgagattttagtgcatccgtcacctgtgcagtgtacactgtacccaatatgcagtcttttatccctcacccctaccggccaagtccccaaagtccattatatcactcttacgcctttgcatcctcatagcttatctcccacttatgaatgagaacatatgatatttgcttttccatacctgagttacttcacttagaataatggcctccagctctatccaagttgctgcaaaagacattatttcattcctttctatggttgaatagtatttcatactgtatataccatattttctttatctacttattggttgatggacacttagtttggctacatatctttgcaattgcagattgtcctgctgtaaacatgcatgtgcatgtgtctttttcatataatgacttcttttcctttgggtagacacctagtagtgggattactggatcaaatggtagttctactttacctctttaaggaatctccaaactgttgtccatagtggttgtactaatttacattcccactggcagtgtaaaagtgttcccttttcaccacatccacaccaacatctattgtttttgatgttttaattgtggccattcttgcaggagtaaggtggtatttcattgtggttttaatttgcattttcttgatgattagtgatgttaaacattttttcatgtttgttggctgtttgtacatcttttgaaaaatatctattcatgccctttgaccactttatgatgggattatttgtttttttcttgctgatctgttcgaattccttgtagattctggatactagtcctttgttgggtacatagtttgcaaatattttctcccactctgtgggttgtctgtttactttgctgattatttcttttgctgtgcagaaactttttagtttagttaggtccaatttatttgttggttttttgtttttttttttgcatttgcttttggggtcttagtcatgaattctttgcctaagcaaatgtccagaagagatttttttaatgttatcttctagaatttttatggtttcaggtcttagatttaagtctttaatccatattatgttgatttttgcataaggtgagagatgagtatccagtttcattcttctacatgtgacttgccagttttctcagcactatttgttgaatatggtgtccttttcccactttatatttttctttgctttgtcaaagactagttggctgttaagtatttggctttatttctgggttctctgttctgttctgttggtctacatgcctatttttataccagtattatgctgctttggcaactataaccttgtagtatagtttgaagtcaggtaatgagatgcctccagatttgttctttttgcttagtcttgctttggctatgcaggctcttttatggctccgtatgaattttcagattgttttttctagttctgtgaagaatgacgatagtattttcatgggaattgcattgaatctgtagattgcttttggcagtatggtcattttcacaatgttgattctacccatccatgagcatgggatgtatttccatttgtttgtgtcatcagtgatttctttcagcagtgttttgtaattttccttgtagatctttcacctccttggttaagtatattcctagggtttttttgttttgttttttgtttttgtatttgtgggttttgtttgtgtctgttgtaaaagggattgagttctctatttgattctcagcttggtcattgttggtatattgtagtgctactgatttgtgtacattaattttgtaacctgagactttactgaatttgcttatcagatctaagagctttttggatgttttagtgttttggatgttttgtgttttctaggtatgtgatcatatcatcaggaaacagcaacaatttgactttctcttttccaatttggatgccctttatttctttctcttgtttgatttctctggctatgacttccagcactatgttgaatagaagtggtgaaagtgggcatccttgtcttattccagttctcagaaggaatgctttcaacttttcctcattcaatatgatgttgacaatactttcttaattttgcaatacactgaatttgctggtgctatttatatacagtgaagcaaaagcttggcagtagaataagaaacaatatagtaataaaacaacttcattactcatgaaaaaacatgcagacaaaaccactactgaccgatttggcgtaattgacatatataaaatacttcactcaacaacagcagaatatacattcttttcaagtatacatagaacatggacagtttaccaagatagaccatattatgggctataaaacaagactcaataaatttaggattcaagtcatctgagatatggtctctcatgacaaaagacttaacaagaaaataaaactgcagatcagtatttctcatgaacattgatgaggaaattctaataaaaacttagcaaactggaagatggcagataggaaacagggctgacatgcagctcccacttggatggacaaaacagcatgtggagattcacaccatgaacttttgcttcggaaaccatcacaggagcatgccaggaaaaccaaaagaaaccacagatcctttgtaagaagcagcagactgctgcaattgccacaagacaggcgaaaacctgtgaattcccaaagtgtgaggggggaaacttgcttctgaacacacatccccactggcgaatctgaaaatccagattacaggagaaagatttaaccttacctgccactgaaatggatttagtgtgaaatataaaagtagaagcagcagtaggaagaaccttctaggcactcccattctccagctcaagcccagggaagccatccctgactatatctcacagacatcctcggggaaggcagtccagattttggaaggggtcacagggtgaaagaaacttccaactgaactttgtaataattttgactggccacaaaccctcttgagcagaatcctggggatgaatgggaaccactgcagaaaggagtgcaggagtcacagccagcagtgtggggagatgaggaggggcatggcctgaaagccatacttgcttcttcagtggagaaacttatagcatggggctgggtctgagtcctacacacaggctgcctgtagataaacttgtcgctcttagcagagcatggcaagagcgagactggcctcaccaactccatgggagtggggtgaaacctattgttactggctttcccccacttccctggtgacagaggcagccatgattccctctggaacataaccccatgcgcccaccacccccctacactccaaagtggcttcagtaagccctgctcaaggagggtctgagctcagacctgcctattcctacccacacctgatagtatttctctacccaccccagtagccaatcacaaaagacgtaaaagcttgggatctttatggccctgcccatcacctgagaaacccaaattcttatcctggccaacacagggcaagcttatatcccccttctactattgcagctggtgctctctcgaaagtgccacctcctggcttgaggccaaccaactcaggacattacagcaactcatgacagaacaaccctgctccaagaaaggagaaaacaaaaaccaattccactgcctgaaacatcctggataaccagtggtcctgagtctgtccacatgacagcttcactgctagcataactagcatttgagaaagccagcacactaagcatatctacaaccaaggactctcacagagcctacttcactcccctgccacctccaccagagcaggtgctggtattcatggttgggagacctgaagatagattgtatcacaggactccttgcagacattccacagcaataacccagagcctggtagccccactgggttaccagacccagaagagaaataacaatcactgcaatttggctctcaggaagtcccatctgtaggggaagagggaaggcaccacatcaagggattactttgtgggacaaaagaatctgaacagcagcccttgagttccagatttttccactgacatagtctacccaaatgagaaggaaccagaaaagaaattctggtaatatgacaaaacaaggttctgtaacacccccaaaagaccacactagctccccagcaatggatccaaaccaagaagaaatctctgaattgccagataaagaattcagaaagttataaagctcctcaaggagataccagagaaaggtgaaaaccaacttaaagaaattttttaaaaaaatacaagatatttatgaaaaatactccagagaaatagatgtcataaagaaagaaatatagcttctggaaatgcaagacacacttagagaaatacaaaatgcacttgaaagtttcaacagtagactagaacaagtagaagaaagaacttcagagcttaaagacaaggctttcaaattaacccaattagacaaaaaaaaaagaattattaaaaaatgaacaaagcctccaagaaatttgggattatgttaaacggccaaacctaaggataactggtattcctgaggaagaagagaaatctaagtttggaaaacatatatgagggaataatcaaggaaaacttccctggcctcactagagatctagacatccaaatataagaagctcaaagggccaggttcagtggctcatacctgtaatcccagcactttgggaggccgaggtgagcggatcacgaggtcaggagattgagaccatcctgactaacacagtgaaaccccgtctctactaaaaatacaaaaacaaaattagccaagtgtggtggtgggcacctgtagtcccagttactcgggaggccgtggtgggagaatggcgtgaacccaggaggtggagcctgcagtgagctgagatggcgccactgcactcctgtctgggcgacagagcaagactccgtctcaaaaaaaaaaaaaaaaaaagaagctcaaagaacatctgggaaattcactggaaaaagatcatcacccaggcacatagtcatcaggttatctaaagtcaaagtcaagacaaaggaaagaaaattaagacctgtaaggcggaaacatcaggcgacctataaaggaaaacgtatcagatttacagcaggtttctcagcagaaacactacaagccagaagggattgggtcctatctttagctcctcaaacaaaataattgccagccaagaattttgtatccagcaaaactagcttcataaatgaaggagagagaaagtgtttttcagacaaacaaatgctaagagaatttgccactaccaagccagcactacaagaaatactaaaaaaagttctaaatcttgaaacaaaacttcaaaatacatgaaaatagaacctccataagcataaatctcacagggcctataaaacaataacacaatgaaaaaaaaaacaccaaagtattcaggcaacaactagcatgttgaataaaacagtacctcatatctcagtactaacattgaatgtaaatggtgtaaatgttccacttaaaagacacagaatggcagaatggataaacattcaccaatcaagtatctgctgtcttgaagagactcacctaatgcataaggattcctataaacttgcagtcaatgggtggaaaaagttatttcatgcaaatggaaaccaaaaatgaggaagagtaactatttttatgtcagagaaaacatactttaaagcaacaacagttaaaaaaagtgggacattataaaatgatttttaaaaaatcagtcctacaggaaaataccccaatcctaaatatatatgcacctaacatggtagctcccaaatttataaaacaattattactagacataagaaatgagatagatggcaacacaataatagtgggggacttcaatactccattgacagcctgagacaggacatcatgacagaaagtcaacaaaaaaaatgcacttaaactataccctagaactaatggacttaacagatatttatagaacattcaatacccaacaactgcagaatatacattcttttcatcagcacatggaacattctccaagatatgccatatgatgggccacaaaacaagtctcaataaacttaagaaaattgaaattatatcaagtaccctctcagaccacagtagaataaaattggaaattaactccaaaaggaaccctcaaaactatacaaatacatggaaattaaataatctgaacttgaatgatctttgggtcaacagtgaaatcaagatggaaataaaaaattatttgaactgactgataatagtgacacaatttatcaaaacctctgggacacagcaaaagtggtgctaagaggaaagttcatggcattaaatgcctacatcgaaaagtctgaaagagcacagatagacagtctaaggtcacacctcaaggaactagagaaacaagaacaaatcaaacccaaacccaacagaagaaaagaaataaaaagatcagaacaggactaaatgaaacggtaacaaaaaaattcaaaagataaacgaaacaaaaagctggttctttgaaaagataaacaaaattgatagaccattaccaagattaaccaagaaaagaagagagaagatccaaatagcctcaattagaaatgaaatttctaattgatattacaaccaataccacagcaacattcaagactgctgtgaacacctttaggtgcacaaactagaaaatcttgaggagatagataaattcctggaaatatacaaccctcctagattaatcaggaagaaatagaaactctgaacagaccaataacaggtagtgagattgaaacaataattttaaaattgccaacaaaaaaagtccaggaccagatgaattcacagctgaattctatcaggcattcaaagaagaattggtaccaatcttactgatactgttccagaagataaagaaagaggtaatcctccttaaatcattttatgaagccagtatcacactaaaaccaaaaccgggaaaggacataaccaaaaaagaaaactatagactaataatcctgatgaacatagttgcaaaaatcctcaacaaaatgctagctaaccatatccaacatcatatcaaaaagataatacaccatgatcaagtgggtttcataccagggatgcagggtttaacatatacaagttaataaatgtgatatgtgacataaacagatttaaaaacaaaaatcatattatcatctcaaaagacacagagaaagcatttgataaaatccagcattcctgtaggattaaaaccctcagcaaaattggcataaaaaggacatacctcaagtaataaaagccatctatgagacacccacagctaacattatactgaacaaggaaaagttgaaatcattccccctgagaactggaacaagacgaggatgcacattttcaccacttttattcaacatagtacttaatgtcctagccagagcaattagacaaaagaaagcaacaaaagccatccaaattgataaagaagaggccaactgtcgctattcactgataatgtgattgtatacctagaaaaccctaaggactcatccaaaaagctcctagatctgatatattcagtaaagtctcaggttacaaaatcaatgtatacaaatcagtagcactgctatacaccaacagtgaccaagctgagaatcatatacagaactcaatcccttttacaacagctgccaaacaaaacaaaacagcaacaacaacaacacacaaacaaaaaaatcccaaaacaacaacaacaaaccttaaaaaaacaaacaaaaaacctaggaatatacttaaccaagaaggtgaaagacctctacaaggaaaactacaaaatactgctgaaagacatcactgatgacacaaacaaatggaaacacatcccatgctcatggatgggtagaatcaatattgtgaaaatgactatactgccaaaagcaatctacagattcaatgcacttcccataaaaataccatcatcattcttcacagaactagaaaaaacaatccaaaaattcatatggagccataaaagagcctgcatagccaaagcaagactaagcaaaaagaagaaatctggaggcatcacattacgtgacttcaagctgtactataaggctatagttaccaaaaaagcatggtactggtataaaataggcatgtagaccaacagaacagaatagagaacccagaaataaagccaaatacttaagagccaactaatcttcaacaaagcaaacaaaaacataaagtaggaaaaggacaccgtattcaacaaatagtgctgggaaaactggcgagccacatgtagaagaatgaagctggatcctcatctctcaccttatacaaagatcaactcaagatggatcaaagacttaaatctaagaggtaaagccgtaaaaattctagaagataacattggaaaaaactcttctagacattggcttaggcaaagaccaagaacccaaaagcaaatgcaacaaaaacaaagataaatagatgggacctaattaaactaaaaagcttctgcacagcagaagaaataaccagcagagtaaacagacagcccacagagtgggaggaaatatttgcaaactgtgtatctgacaaagaactagtatccagaatctacaaagaactcaaatgaatcagcaagaaagaaacaaataatcccatcaaaaagtgggcaaaggacatgaatagagaatcctcaaaagaagatttacaaacagccaacaaacatacgaaaaaatgctcaacaccactaattatcagggaaatgaaaatcaaaaccacaatggaatgtcaccttactcctacaagaatggctataatttaaaaataaaaaaacaacagatcttggcttggatgtggtgaaaagggaagagtttttcaatgctggtgggaatgtaaactagtacaagcactatcgaaaacagcatggagattccttaaagaattaaaagtagaactaccatttgatccagcagtcccactactgggtgtctaccgagtggaaaagaagtcattatatgaaaaatacacttgcacaagcatgtttataacagcacaatttgcaattgcaaaaatatggaaccagactaaatgccatcaacatagagtcttttatctgcacattgggtacagtatacactgcttggatgatgggtgcactaaaatctcagaaatcactaaggaacttttccatgcaaccaaacaccaactgttctcccaaaaatattgaaataaaaaaatttaaaaattagcaaactgagtcaatatacaaaaaggataatcatgactgagtagggtttattctaggaatgcaagtttggtttaacataagaaaatcggtgtaattcaccattttaacaaactaaaaaaaaaccatatgtttatctcataaatatataaaagacatttgaaaatctaacattaattcctcataaagactcttagcactttttcaatttgacaaaggttatttttgaaaaacttacagcaaacgtcacacataatggtgaaggactaattgtttcacccttaaagtcaggaacaagttaagaatgccttttctcaccacttctaatcaaaactgtactgaagatttgaaccagtgcaaaaagataggaaaagaaatgaaaggcatccagattaaaaaggaataattaagactatctttcactcacagacaacatgactacctatgaaaaaaaaatctgatggaatctacaaaacagctactataactaatatataaaaaattaatatgcaaaatttagttgtatctctgtataatagcaatgaacaatcagattgaaataccatctacaacagtacaaatatgttaaatacttatagattaaatctgacgaaagatattcaagacttctatggtgaaaactacaaaacatttctgagagaaattaaagaagacctaaatacatggagagatattctatgttcgtgggatattgaatctttaaatcagttctttgcaaatttggtaaaatcccaatcacattttcagcaggaatttttatagaagtttaattaattgattccaaaatttatatgaaaatggagataacctaaaacagccagagaaactttgaaaaataacaaagctgtaggataacactaactgatttcaagattaattattgtaagattcttttttttctctctctctattgcccaggctggagtgcagtggcatgatctcagctcagtgcaacctccgcctcccaggttcaagtgatactcatgcctcagccttccaagtagctggtacaggtgtgaaccaccacacctagatttttttgtatgtatttttagtagagatgggggtttgctatgttggccaggctggtcttgaactttcagcctcaagtgatccgcccaccttggcctcccaaagtactggaattacatgtgtgagccattatgcctggcctaattattataagattattgtaatgaagatagtgtaatataggtgctaaggtcaacagtaggttaatggaatagaattaaacaactcagaaataggctcaacatatagacaactgatttttgacaaaggcacatggcaatgtagtggagaaagaatagtcttttctctctgaaacaattttatatccatatacaaacttttaaaaaactcaatccatacctcacaccatatacaaaaattagctgcaaatgaatcatagacttgaatgtagaattcaaaccaatataacctctagagaaaacataacataggagaaaatgtttgtgaccttgggttaggtaagatttcttagaaacaacattaaaagcacaatacataaaagaagaaattgaccaattagatgtcatcaaaatttaaaaccttttctttttgaaaagtactttaagagaatgaaaagacaagctacagactgggagaaaatatttgcaaattacatatctgacagaggacttgtttctacaacatattttttaaaactctcaaaacacaataatacaaagtaaaaaagctaattaaaaataggcaaaagatcatcattctcagtaaactatcgcaagaacaaaaaaccaaacaccgcatattctcactcataggtgggaattgaacaatgagatcacatggacacaggaaggggaatatcacactctggggactgtggtggggtggggggaggggggagggatagcattgggagatatacctaatgctagatgacgagttagtgggtgcagcgcaccaccatggcacatgtatacatatgtaactaatctgcacaatgtgcacatgtaccctaaaacttaaagtatattaaaaaaaatagattaaaacaaatatcaaatgaaaaaaaaaatgtggccaaatactgttattgtggagaagcctgaatctggcattaaattacaccaagtggacctttgaaaaaaaaaaaaaaaaaaagatttgaactttccaaaataagacatcacatgaaatgacactcaatctcattagtcattagagaaatgcaaattaaaaccacaatcaaatacaactacacgtctattagaatgaccaaaactagaaagattaagcattccaagtgttggtgaggatgtgtaagtgcatccacaccaggatactattcagcaacaaagaggactaaaccactgatgcgtgcaacagcatggatgaatttcaaagtaaacatgctgagtgaaagaagccagatcaaaaaagaataaatactatttgatttcagtaatataaaattacagaaagtacaaactataatgacaaaaatcatatcagtatttgcctgtggttggcagagtagaaagggtgggagtgagaggcacatgggaacatggaagcttggggggcgatgtgtcatgttcattatcttgatcacagtgatatttttatgggtgtacacataaatcaaagcttttcaaaaaggatacttcaaatatatgtagcttattgtatgtcaattctattaggttggcacaaattacttttggtgcacaaataattgcagtttttgccattactttaatgcaattacttttgatataattacttttgcaccatcataatacctcaatacagtagttttttaaagaaaaaacttagtgcacctttcaagttaaacagaagaataggaataatggagtaataactaacatctccagagaatcaggaggcacctgcactatgcaaagcatctgtttctctatctgtctgtctttattttatcctcataacagccttatgaaatagatgctcttctcatccccttttcacagaggaggaaactgaggttacataattttcccaatgccacaaggccagtaagctgtagagccagggtctgaaccctggcagtttgctccagagcttggactctaaaccactgtaggtgtcgattaattttcatgttttgctgtcatcatttccagggaaatattgccagagaagctgcatccgaggaagctttaacagcagtccaaagtggaaatgttagtgaaccggaggtagggtttgacgagggcctttgcgtgccttctagccaccccatgggtttcacacctttctacctcagaggatttgtgccctttcctcctcccaatctccctgcctgtctccaccagttcacacctaccacctcctttaggacttgctgcaccaagcctcacctccttacctcttcccctgctgtgattaatcttttcttctgtatcctctgcatggcctggactgtaagttgcattttctacataaattatttgcaaaaattttagtaaatacagcttatctctccttcccattgcccaaaaagaaaacattttggagaggcaaaacatttgtaagagttttctctgtatcatatgcacatacatacacttctgtccgtgtctaggtgtgttattaatatatgtcatttacattcatctcaggattttggaagtcctccctcctgttacaaattcaggccaaggggcatagcatcttccaccagtgcagtggctatccctggggacttcaccatcctttgttggtttcccttcaccccacccatgcctttgcaggtggtccgttgaccactccattggagtgtcccttctgttccctgccagaagcctggtggttcaggaagagattggcagggtcctgtgaaccctgctcaggatctcagacttttcctaagaagcagaggagggtgttgtaggcttttgagtgggaggttggtacaataaagcattttcattccctgatgatgagcatagtcctggaatttcagtagtttcccaagagcctcttggtgatggatggactgactcagcaacagaagcctagagaacccttgagaagggaatggaacatggggcttggtcatatccatagaggcactgggacagattcactgaacactaagcccagacactgaagttctgccagaggaccaggttctccaacctgtctcctctccagattctgaccagtgaaggagtctacccagaagtcagctagggattgaagtacccctttctcatggctaacactgaaccagagaacaaagcttggaccgagaacacaaatgggcttcccatttctccttactgaattaagtgcccccatgtggttgtaggcaggcctcacctgtggggcagggtctccccactcccagctaattgcatggaggggaggagaaaacacacaacctgggagcaggatgtgctgtcagaaagagaaagcacgatgtaggcacagggtccagtttttgaatctcacattagcatatgctgttggagccccacccatatcctctagcacgtattcttcctgagcactctgtgaagacaaggactgcaagtgcctggtctttcttccatgccatgtttgcagcagggcaggctgtttggggaagcagccatcagccagtgactgaagggattggagaatcaatttgccagctccttcacctcttaggtgggaccactctgcactgtgttctctaggctttcggagatccaggtggggttgattcaccatagtcacccacatcttgaaacaccccatgctggcagcctccccttcctcacctcgcatgccactcctcttacagaatttcctggctttgctccccaagtaaactactgactctcagacacttaattcagggtgtgtttctggggcaacccacactaggagactcactgaccagttggtcactccctgtgccctagggaggaaagtcagggtgtagaagaggacagcagttttctctctaatattcctaagagggtagccgttccgttatgaacccaagcaaggatgtggttggagggacaggatgcctgcccccaccactgcatcaaacatggttggaaccccagaagacacctgagtcaacaaggtggattgatctcctatttttatctcctctccctaccggagaaaaacactgaaatgacagtaaagggataaaaagggcacaaatccacaaaggtgagatggagaggagatattggaagataagcactttaaaaatattgagaataaaaaaatcaatggaagagtttacattggcttagcacagctgaggaaggtgaaactcaggcatctttatgggaggagagactggtgaaaagtgtgtgaattctgcacaaggctgaagactggaggtttgcagaaggtggggtgaggaattgggctgaaaagctgggcagtctgatgtggagtgactggaacactggatccctgcagactccagttaggttgtcagccacaccccaagtgagaggataaaatgactattctctagagaaattgaacagaggctgctgctaattcagatttagcctgtgctgcatgggcgttgtaacggtgaggaatagagaacagacaagtaagtggaattctccacttcgaacagaggaatccacagcccctcctccagccacgccctctcaatgccaggagccaggccttgtattaagtttctattgctgctgttacacattaccccaaacttggtggcttataacaacacaaatttattattgtgcagttctggaggttagcattccaaaatgggtttgagtgtgctgagcttcaggtgtagacaggggcgtgttccttctggagactctaggggagaatctgttcccttgcctttgccagcttctagaagccacttgcattccatgccctgtgtccccttcctccatcttcagagctggcagcgcagcatcttcctccctctgactcagacctgctgcctccctcttagcagatccctatgattcctctgggcccacccggatcatctaggagcatctcctcatcatagaacccttcatgtgatgacatctgcgaaatccctgtgccctgaaagataacatatttacaggttgcagggactagtacctgtaacatctttggggaccacagtcctcaatacagaatattggagaacttaagtcccaaaaaactgacaggcccaaggaaaatgccttcagatgatgtcactgaaggtggccacccagtaataatgccagatctctgcctgatcaccccatgaagtgccccagttagccagtgtctgtggagttttgcctctcaagcatgttgcttttaggaagctaaaaatgtgctctaacgatatgagggcctaaatgatgaacaaaaaagacaaagaaaagacctggaacttacaaaataggagctgcaatacaggcaggacggcagagctgcaagtccagattagaggggagaaaaaaggaagctcatatattatctcaaacgcctgatcatttggaaaataatagtgaccaacacttggcaaatctgataaaggaagtgaaaaacttagcaaaccaagtgaataaaaactaagcacacagatgaaaacattgtcatattacactactttgctcagcaacaacagaacttacacattcatattagtgtaaatacttacggatttaaccctgaattgtgatgtaattttcctgggggataagatgtggggaagagggtagtatgagagggattaatctagccactgcatcaatattgaataggaaattctaaaaactaatgaatttagaaacagcaccataagcatattgttcagaaatatagaggtaaatatatacccaaataaatgaaaacgttgaaagttctgttcaatgggggtagagacttggaaggacagagaactgctgattttcttaataaatgtttggtgctaatattattttaaatttttccatatgcatgtattactttgatttaaaagaactccatgagggatctcaaagggaatcatcttctgagttatgacacctttttaggtgcacctaaaccaagacagaacagcctcagccctgactttccaggtggctgtggtccactggaccttcctgggctccacctccccacgatagttactcccaggaccacctgagcagtcccaagattcaaaaattcttgtatcacaatgaaaacagctttggggacagagggattttgcttctggagttattataatatgtatataatactatcacgctctaatctctaccctgggatgcagttaaaatatggaccctatgtcaaaggccaactgaaactatttgtcttgtgtgagaccttcatgtgagaactagttttttttttctttattattattattttttaaattttattttacgttctgggatatgtgtgcagaacgtgcaggtttgttacctaggtatacatgtgccatggtggtttgcggcacctatcaacccgtcatctaggttttaagccctgcctgcattaggtgtttgtcttaatgctctccctccctttccccccgacccccctgacaggccccagtgtgtgttgttcccctccctgtgtccatgtgttctcattggagaactagtttttaaaaacattttatgaattttgagtatctcattaagaacctctccttaaaaccaggcctggcccaggatgagttgtttcgggtgacagtcacacctgtcctcagaacggtgtcatgtagagataatgcagccaccagcccactaaattacagggcattgacaggattctcattggctcctcctgtctccttgctctaggacatagaaaaactcagtgacatctccactggatatgcacagtatcaccatgtcagcagtaggagcttggcatcgctcgtactgcctgaagagcccgtccacttccgccccatctacaggggagcctcagctgctttttgtattcagctgttttgtattgatgagaaatatgaagcaaggcaagtactgaccttctggctggctgtcacagtgagaatcttttctggcattggtggcccaacattttaactttacagagccagtaatttccaaacctggcccacatcctaatctcctggggaattttttaaaacacaaattcctaagccccatccagagattctagtccatcaaattttaacaaggcctacagaagtgggctagaaatctggcctacctatgtaacaattgggaatctggaaaattatcacttacataaccacatgctgctcccattctgtaaagtttgcatctcttggataatttgaatttgggttactggttgtctagagtctttggttgcaagtaacaggaaatccaaccaaactggctttgaaaaaaaaattgaataattgcctcacataactaaggataactctggtggtgagactgttttaaatatggcttgatctaggatttatttagattaccaaatcaaggaccaagtttctctctctacctcttcaccctgtgtgttagtctgttttcatgctggtgataaagacatactcaagactgggtgatttataaagaaaaagaggtttaatgaactcacagttccacgtggctggggaggcctcacgatcataggggaagatgaaagccatgtcttacatggcggcaggcaaagagacaatgagagccaagtgaaaggggtttccccttataaaaccatgagatttcatgagacttattcaataccacaagaacagtatgggggaaccacccccatgattcagttatctcccacagggtccctcccacaacacgtgggaattatgggagctacaattcaagatgagatttgggtggggacacagccaaaccatatcaccctacttccctgctgttggaccccttctcagaggagtgccccatcctgggcctaagaccactgacattctcaggtctcaggtctgcatcagaatccagtgagaaggacttgccgggatgggcccagctttttccagccaaagtctcatgaggcctgacaggactgtgtgttcattcctgagccaacggctgtgacaagcccatgccacaaggagatggagaagatgggctccatcccttagctcatgctccatgccaaatctgcagctggagtctcagctacatggaatatctgagcaggggataagttgacacccaacagcaatccagggctacagcaaagaggaggcatgcatggtgctgggctttgtctaaagccccggcgcccaccagacctcacagccacccaccctgcccctccagaacacccacatgttcagtgcttgctgttctcctgtggtctggacactggacgctgccctcagtgcctggattccacatctccttagcacccacccctcatctgttcacagaaccatctcgaagaggaaataattggcccattttgatggagtggaaggctctagggtgtcttttagatgagcaagaatagctggacagttcctcttcagaggatctgtttaaacatgttcccagtctcccagcatcccctgttgtactttaacttttttcatctcgagtttttagcttctatggagatctgggacattgaaaagaaattctttttattctaattatgttgtagacatataaaaccttgtaaagcctttctatatttgttgctttatatttcttttatctgtacatttaaatatgattgtgcttagagtatactttttgaattttgaaacaggaatttgatgacccagtgtggtttgcctatgaatgtacatctacagctagtcagaaaatcttcaacagataaaagggaaacagatcagaagcaacctataatatttcccacctctcctcttaactcttccaaaacagaagggaaggatcggaggcacagaatgaccaattttgtgttggcttttcaaatgcacagagattgttaattgatgtgaaagtgccttcagttctgcagaatactttattactgacatacgaagcttgcgacttatgcaccccattagtgttcacctagacacacattctgactagtggttggctaatcgctgcccgaggggagggagctgtaaatctctgtaaacgtccactgatgttgcatttgcttgcagggcactgacagtgcttactgtcttgtttacaggtcgctggattttatgaattttgttttcagtcttttttctgtaagtacatgctgaattttgagaactgattttgtaagcttagagaacttatagaaaagtaaaatgccataaatttattatgctgtgaatgttgaggtttgtgttcggagaataaggtcaaatggcatgtcatgagctcataaaaatacaaaatattgtcattttcaagaatttttaagtcatgctattttagcagttctctttaaatgcaaaatttctgttacacatagctttaccagtgttttatcagaatcaaatcattcatagtaatacatgaaaatgttggaaattaaagtgaatgacactgttattttatagattatgttggctccaagtattctgaaaccatcatattgcttttctgagggtagcaaagtagggacttgttgattttgaggttggcatttctttccctactagttcctcaggcctgacttcatgcctggctggtagagggggctcaacccacattgatgaatgggcctgcaggctaatatccaagtacaaataagattctccatgccagggtgtcccgggcttctgcctacattcttgtctcattattttctagggatgaagatctaaccaaactcttacacttctttattgaaggaaagaaaatgaggaaggaagttttgagggacaaaatgcatttttataaagacaggcctgttaattaagtaaagtcaacaactgtacttctccagttgactgatttcaagaaaagtatctattgctttacttttcctggatactgtttctaatgaggcaaaaacaagtatagtttaattattttgtcttacaactatgtgatgttaggttttatttcctcatttgttattataatgaagctttataataaggcaatatgttctccatcataatttttaaaaattacttattaaggcactttccaaacaatgtagattaccctgaacataggatttacaaagtcggtttccctcaaaaactcctcaaataaatttcactaattttaattattttctactttaacgtccatgtaaacgtaaatatttaacattataaaagtaatgctggctttaaaaaggtaaaagagctgtttacatttcaattctatttgacttcggaacatggacgacaggaaaaaaaataaccttggttgcttcatccttaatccttcaaatccaagatgaagcaactcattatagttagtctctccctcccagaggaagcccacccagacttggcacccagtccttattttcaacttgagtatttcagcaacttgactctcaggttccccaaaaggagtcctactaatttgctaaaaagaaggaaggtaaggtcagacaatggttcactcctttgagttgcacaaatgtccccagggttttggattagcacaagtaatgccttcacagggttcaagaggaggcgagatcccaaagggacaaattagcttcgggaagagcaggctgcttctgcagggacctggcagaggatcaggcagctgcgtgaagctcagatagcctagagcagcactgtccagacatggagtgtgagccacattggtaattctgaatgttccaagagccacaaggaaaaaaaagaaaaaggaacagatgaagtttatatgataatatcttttatttaacttaatatgcccaatcctttttttaaagagatagggtctcactttgttgcatgcaatgtcacaatcatagctcactgctgcctcaaactccttggcccaagggatcttcctgcctcagcctcccaaatagctgggacatgccaccatgcccagctaattaaaaaaaaaattgtagaaatggggtcttgtcatcttgcccaggctgggctcgaactcctgggctcaagtgatcctcccatctcggcctcccaaagtactgggattacagaagtgagaactgtgcctgggcaaatttaatcatttcaacatataatcaatatgaaaacttattaatgagctatttacaatctttttctcgtactgagtctttgaaatctaatatatatttcacatttatagtacatcacaatacaagtactaaattttcatcagaaatagttcatctgtatttgtatgttataaaatttacagttggatacgtagattcacataatccaagcacacataaaacttttccagtaatggaattaagtatccatttttttaatttaaatgaatttaaatgaaataaaatttaaaatttagttcctccgccaatactagccacatttcattgtctactgtactgacagggcaggcctagaatagaatgaatggcagccctcaggacatgcaagacctcttatgtctgctaactaaacccactgcctgggtttaatcatgctcatggatctgttcacccaactgggatcacgtcatgataaaatacgtacacattggtttatggataatcacagaattttagagccaaaaaatgcctgaagtatcatcctcccatctcgcaagaggaagggaccactggtgtaaggtcacttagtaagcaaggggcctttgctaggacaccatgctacctcattgacttggtgacacaagtgaacttacctgtatgaattgtcttggtttaaaaactacttccacagaagagttatgctgaatgactgccattgtttataagattcatttattcaggtttcagtgagaaacaaagataccttttccctgctcttgtagttgcttatttcctgaattttatgtgattattttccaaattataggaaaggtaatttgaatatcctctccttaatcaacacattttgcttctatttttcttggtgttttttagaggaatttgttttttgattaattttttttattctttctctgtgtcctggtttttgatgatgttaggataagaacttctgtgtaatttctctgccccatctcacccccgagttcttcctcatccagaacttcgtgaaaatggtccctttcaacacctgcaccctcgagcaggacctctacgtcttccaccgggctggattgctcaagtgagtagacacatgtttggccacacaacaatccatgaaattacagaagagaagggaacaaggaactccctgctattataatttaataatttattttaaatatcatcttttattagaagaggtcttgagtaagtgattttaactaatacatttagagaaagaatggcacttgagaagagatttgtcctgtcagatattaaaacataatatagctccacaataatcaagacaatgccatgttgacagattctgtaggcagaacaatgtaacacaagaaacagatccagtatagtaggaactcagattgtgcagatctttgtatgtgagtgtgtgtatataatacattcacgacaaagtgtgtgtcacaacagtgggaaaaggaaggattcttctgtaaatcatgagacaaaatggaggtagaaactttttttatactctatcataaaatagattctcaggtgattaaagagttaaatgtaagtattgaaaacataaaaattagaaaatatatttacagtgctaagttctgtgccaagttctgggaacacaatggtgaacaacatgtagacatggtccctgccttttcaaggcttatggacacacagagtgtaaaactgcaactgtgatgggagtaaccagtcctgggcatgtggtactgagcatggaacattgggagagttggcccagccagaggaagctttcttgagaaagtaatacggagtgctggatgaggaaagtgagtgaagattgacctttatcctgtctcagaatgggaaagttctttttaaaacatgaaagaaaaagattaaggtgtcttatactataccaagttttttgaaccacctgattttattaaaatgtaactgaccaacagaaggatgttttaaacaaatatggcagacaaaaggtggatgtatttaatatataaagagctttaatgaatcaataaaaaaaatcacttaatacctaaatagaaaaattaataaaaggcatgaccagactgtttctacaggaaaaaacaaaaaacaaaaatcagtgtatatttaataccttctatcttatttttacaaaatgttctgaggctcatcaaactgcacccttgaaatgagtgcatttcattgtatgtaaattagacctcaataaagttgatgcacaatcttctgatgaaaagtttggtggaggagtgtcagagagctcactctataattgctgtgttaaccttttgagtgaaactttgagaaacatcctagatgttcacttcataattagggactggttaaatgaattttagcaaatgaatttagtacattatgatgacgacttgaagaaataaaaccagatttctatatcctatgtggaaagatagctaggatggtgagaaaagcagtcaaacaataatagtacaagtactaatagtaaggataattaacatttattgagggtttatagtgtgccaggcgctttcttaataatcactttccatgtgtcaacactcacagtgacctaattagttaggtatcattattatcctcatttcacaggtaagaaaactgagacacagagaggttgagtaactagtccacagtccacacagcagaaagtggcagaactgaaatcggaacccaggctgttagcttacagagccaactcatgaccaccccacatattgtttctcgacatggtgtggtcagtgtaatcccatttgattgttgtgaagtgttcacaggtagcagtcagcactaatactaaactgttgtatcagagtgacccctaaacacaactgccttgagccagttctgtctctgtcctgcagtagtccagacaagagcacgtggtctaaggagaataccagctttttctccatgaagttgtccaggaaccgaagttccttctcttattgcccctccattccatagagcaagggttacctaacatatccagagagaagcatgaggtgtgtgaatttggatggaaaggaaagctacatctttattccactaacctgtaagtgaagtttaatgtgtccttccattgtgactggagctagcaggtctcatagtgttagcagaaaccatgacttcatagccagtagaaatgacagatattttcgttcatgtttttgttgttgccgatgtctcaaaaatatcacataatatttaccctactttgaaatttcagtaattttattcttgaccataatttattatgtaatgcattaacaaagaggcacaggcattactgtaacacatttttaaaaacattttgctaactgtgtttcaatataatttataatcctttgtgttttatttaatgaatgtagaaacatttgtctgggaaggagttcatagcatcaccagagtgtcaaagggctctgtggcatgcaagagtttcagacccacggccagagtggacttttcttccttgtgctcagagctagctcggagcaccgtagccacattgcagcccacagggaagggtggaatgagaaatggaagaggggaagcactttcctcttaggggacatgaatcacctctgttcatattatgtgatcaggaacttggttgcatggccctacttagctgcaagggagcctggaagatatgttgctggtaggttgggcatgtgtccagtaaaaaactcagttgattccttaattaaaaagaagaggaaaaaggatactatgggaacattatatctagtttttatcttgtgtatgtatagaagttctaaaaagttacacaggatttcagtaaccttatatgcctctgggaaacaggactgggaattgtaggtgaagatggtgactgactttgcattatgtctatctgttatgtttgatttttttgttttaattaataaacttttttttttttgagacggcatctcactctgttgcccaggctggaatgcaatggcacaatcatggctcgctggagcctcaacctcccaagctcaggtgatcctcccatctcagcctcccaagtagctgggactacaggcatatgccacaacacctggctaatttttgtatttttttgtacagacagggtttcatcatgttgcccaggcttatcttgaactctcctgggctcaagcagttcacccaccttggcctcccagtgttgcaattacaggtgtgaggcaccacacctggccaataaactttttttccaaaaagtagttttaggtttacagcaaaattgagcagaaagtgcagagagttctcacaagccccttctccaccaccatacacagactctcgcatcatgaacatccagcactagattggaacatttgttgtaatcagtgaaccaccactgacatatcattatcacccaatgtccatagttcacattagggttcgctgttggtgttgtacatcctatggctttggacaaacgtataatgacatgtatccactgttatgatagcacacagaatagttttactctgctgaacatcctctgtgctctgtctgttcgtccctcgtttcccacaacactgtcaaccactgatctttttactgtcgccataattttacatttacagaatgtcacaaagttggaatcctgttagtagccttttcaaatttgcttttttttcacggattagtatgtttttccatgtcttttcatgactggctagctcatttctttgtagccctggataatattctgttctctggatgtaccacagtgtgtctacccatttacctacttgaaaaacctcttgtttgctttcaagtttgagcagttatgaataaagctgctataaacattcatgtgtaggtttttatgtgggtgaaagttttcagctcatttagataactaccaaagagtgcaattgctggatcctatgaccagaatatgtttagttttacaagaaactgtcaaactatctgacagagtggctgagccattttgcattcccaccagcagtgaatgagagttcccgctgctacacacccttgccagcatttggtgtcatcagtgttttggattttggccattctaatcagtatgttagtgttacctcactgttttaatgacatgtggtgttgagcatgtcttcatatgcttatttgccaactgtatatcttctttggtgaggtgtctgtttaggtcttttgcctatttttaaatgggttatttctgttgaatttttaaaaatcagtgggtgtgcagtacttttgtgatagaaaaatgtagttaattttttctacactgagattttaaatagtattatgattcaagtagaatttttaaaaatgtactttatactccgcattcctaaatgcattggtgactttttttcttggagttttcactctgaataaatacaattgaataaagacactggagatggagagcaatgagatgatacggatctaggaaggagacatcgatctgactgtagtagcggccttgttcttagtagctttaattacataatttacattcatattcttttctttcacactcttttactgtgtccatgcactacttttcttaataataaaatctaaatcttttaaatgatgagtctttccacacttgtctgggaattagtttggttgcagtggggccctggcttttcttcgtaacctttttcagtgccagcttcattttcttgaatcacttgcatttaaaattggagcacatgatgtatacctgggttcttttctgaaatattaaagactcagaagctgaactagtttttgtgtctttaacaagtcatgtgttgtcgcagttgccacctgagccctcatcaggaaccctccttcacagcctcctccagtttgtcgccagcgcacccgccagcccacaccagtttccctgcctgtgcacctctgtagcttctctgagtgccatggttgtgtccatcgcctttttccattcaagaagccatgcacggtcccataggggaagacatccctcgaaacccacatgcttatcaccattaggggtgcacatgcagtgggcagttgttttcaacagaaagcatagatctcctctttaattctttaaaccttattataagcataaaaagctttttagtgaaaccacacatttaatgttaaaaatggtagctttacctgtcaatattgctcagttcctgtagggaggacaatattgttcttccctttgctcttttaaagtccgcactcctgcaccctcttcaggcagctgatcgtggctgcaggagtggaggagagaaaggagggtggccaacctgaagaggcttctacacagatgagaagggagagcaacccccacccttacaccccagcaatgtttgtattaaaaaaaaatgagtgtgctaacaaatgaatttgatggaatttcatgtcacacaaaatgcagttcggaaatgtgagagtgggagtgaccttaaagaagactccatcaccttgctgggttcctggcatcagttagcccgaggtggcagtgcctgcacagggccttccctttctgtccccgcgtccccatggcattctctttaagtgccgagatgtttccagtcagtcccctgcacctgcaagtcagccaggggtgcaagaggagtccaggtgcaacagccagggtcctttgtaagtcagggcactatccagtgatgctcagtgacattgcaccctttgtatctgtgaggactcacacctggcttttagaaagtgaggctttacaagagcttgtttgtcccttaaagaaggccatcagggtgggctggatgtacggccaccatggaccgtggaatattcctccttcttgctccttagcacctggcttcccttctcaagtttacctcattttactcaaggacagttctttcttcatatgctcttcagttccactgcaagtgtggtccagggatcggcagcagcagcatctgctgagactttgctaaaatacagaatccaaggccctgccccaggttttctgaatctgtgttgctaacaagtgcaccagttgactttcatgcacgttaaaagtttaagaagcactgtaggggcttctggttttttttttgtttttgttttgttttgttttgttttgttttgttttgttttgttttgttttgttttgagacagagtctcactctgtcacccaggctggagtgcagtggtgcagtcttggctcactgcaagctctgactcccaggtttcacgccattctcctgcctcagcctcccgagtagctgggactacaggtgcccaccatgacacctgactaaattttttttttttatttttagtagagacagggtttcaccgtgttagccaggatggtctcaatctcctgacctcatgatccactcacctcggcctcccaaaatgctgggattacaggcgtgagccactgcgcctggctggggcttctgcttttttaatgggtacgtcatctggtagaaaataattgtgatttattacaaaagaaactatcatcagagtgagcagacaacctacagaatgcgagaaaatttttgcaatctatccatctgacaaaggtctgatatccagaatctatgaggaacttaaacaaatttgcaagaaaaaaacaaccccattaaaaagtgggcaaaggaccatgaacagacacttctcaaaagaagacattcatgcagccaacaaacatgaaaaaaagctcaaaatcactgatcattagtgaaatgcaaatcaaaaaccacaaagaaatagcatctcatgccaatcagaatggcgattattaaaaagtcaagcaacaacagatgctggcgagactatggagaaataggaacaattttacactgttggtgggtgtgtaaattagtccaaccattgtggaagacagtgtgctgattcctcaaaaacctagaaccagagataccatttgacccagcaattccatttctgggtatatacccaaaggaatataaatcattctattttacatgcacgcatatgttcattgcgcaccgttcatacttgcaaagacatggaattaacccaaatgcccatcactgatagactggataaagaaaatgtgataccatagaatactatgataccatggaatactatgtagccatagaaagaaataagatcatgtcctttgcagggacatggatggagctggaagccattatcctcagcaaactaacacaggaacagaaaaccaaacaccgcacgttctcacttataagtgggagctgaatgatgagaacacatgaacacatgcgggggccgggagcggggaacaacacacattggggcctgtcagtgggggtccgaggggagagagagcatcaggataagtagctaatgcatgctgggcttaatacctaggtgatgggttgacaggtgcaacaaaccaccgtggcacactatgtaacgtatatttgtcctgcacatgtatcccagaacttaaaatagaattaaattaattttttaaaaagaactgtgattatctgtcttccaaatacagattttctataaaacatataagccatacctacttcactttttattattttattttattttatatttatttctttttctagacaattttagaagtttaaaggccacacctactttaaaccttttatgatctagtaattttttggtactgctgagttattcatttcttctgtatataaatataaccttttggttagatttgtacgaatatgtggactataacagttttacatattttttttctatttataccaagtaatgctttaatttctcttgcttgtttctagttcctggccctttcttttttcatacacactttccacctgtggttttctaaaaccattttttgcatttcaaaatttaggttaacgatgagaatgctttcatttggaaaggaaagaaaaaccaactcagaatggcttccactgtaggacatgtactggctcacataagcaggaggtctggagataggcagggctttagggtttgtatctccagggtcttggtttctttcctttcttccaccctccctccatcctgaaattgacgtcgatcacattgacaaaatggccactgggttccggggtgcaggaggagagtgctggctgatgtcttgttttccttcccagagaccccagcaaagccccctcattcatccagtaaaatccacagcactgactgcatacatgtgccagctttatcccaggtgctggggaaacagaaatgatgcaaacagatagaaattcttgccctcacggggggcctgcattctagatggtggagaaagatgtaaaggaaagagatcaaatgcacagtatataggcactaagggcgaacgtgaagagtatagcaggtgtggagaggggataggaactgctgagtgggagaggggctgccatttattgcctagggtgacaggaagggtggccatgagtaaagacctgaaggaggtgaggaggagccacttgggcatggtgagggcacaggtcctccacacctactctttaaaaatgtatcatgttcttctattttttgcttcacttctctttacatttgggatgaattgtttctgctcttaagtttggttactttaaatttcatgaccttgtgttctggtcctccacctaatttcattcttcttcccttgggaaattatatttgtgtctgtcatctgccctctggctgtgctggtgagcactgggacaaattattcattctgtcattagtgatggctacctcttctgtcaacacattccacacccaggttccctctccttttgtttagtgactacaggcctttgagatgagaacatttcctaatgtttatgttaacttgcactttaattgtggataaattaaatgcttcctttatgatacattttcttcatatattaacctctaagacacttccaaacttaatatgggatgagtgtgtgctatagatgattcttctatttccgctgcttgctcattcttgacctacccactggcttttctgtcctcttgtttattcattagcagagaacatattcaggtgaactggttgcccactccatcttgccaccctttcacatgatgcttttctgaaatttgacattttaaatgtggggaaacgtttcagatgtatttggctaaccaatatttattgtgctaggaattattttttataaataaatatttactgctgagttagatcatacagccattaacttggctcagtaaataaaatgcatttagctagttgtcctttaatcgattctcccccccaccatttctgttttctttgcttttctgtgagtggctcacacagaaaattaccattgttcctatttcaggcccgtgttattgtggagagtgttttaacatcgtcagtccttggccccttctgcttttaatcagcctccttgaacagaacccgatagaaacttcatttttaattttgtgggttttattttctttctttatttatttttgatttaaactgaaatactaatggctatcaaattgtttcatgattctattacaaagatcacttctttggaatccagaaagactcagatcactttttcttctccctgttatttcatttttatttactggtattaaaaaatttccctattttctgcaagacataaagggcatccagataggaagagaggaagtcaaactattcctgtttgcagatgacatgatcccatgtcttgaaaatctcatagtctctgccccgaagctccttaagctgagaaacaacttcagcaaagtctcaggatacaaaatcaatgtgcaaaaatcactaatattcctatacaccaaccacagtcaagcctagagtcaaatcaagagtgcaatcccattcacaattgccacaaaaaataaataatatacctaggaatacacctaaccagtgagagatgaaagatctctacaaggagaactacaaaacactgctcaaagaaatcagagatgacccagacaaatgaaaaacattccatggtcatggatagaaagaatcaatatcattaaaatgaccatactgcccaaagcaatttatagattcaatactattcctgttaaactactattgacattcttcacagaactagaaaaaactgttttgatattcatatggacccgagaaagagccagaatagccaaggcaatcctaagcaaaaagaacaaagctggaggcatcaccctacctgacttcaaactatactgcagtgctacagtaaccaaaacagcatggtactggtacaaaaacagacacatagaccaatggaagagaatagagaacccagaaataagcctgtacacctacaactatctaatcttcagcagacctgataaagcagtggaaaaaggattccctattcaataaatcgtgctgggataactgggtagccatgtgcagaagactgaaactggacaccttacttacaccatatacaaaaattaactcaaggattaaagacttaaatgtaaaacacaaaactataaaaaccctggaagacaacctaggcagtaccattctggacataggaatgggcaaaggtgtcatgatgaagatgccaaaagcaattacaacaaaagaaaaaattgacacatggtatctaattaaagagcttctgcacagcaaaggaaactgtccacagagtgaacagacaacctatagaatggaagaaaagttttgcaaactatgcatctgacaaaggtctaatatccagcatctatagggaacttaaacaaatttacaagggaaaaacaaccccattaaaaactgggcacctgtagtcccagctactgaggaggctgaggcaggagaatggcgtgaacccgcaaggtggagcttgcagtgagccgagatcacgccactgcactccagcctgggcaacagagtgagactctgtctcaaaaagaaaaaaaaaaaactgggcacagaacgtgaatagacacttttcaaaagaagacatacatgcagccaacaatcataagaaaaaaagctctacctcactgatcattagagaaatgcagatcaaaaccaccaagagataccatctcacaccagtcagaatggctattacaaaaaagtcaataacagatggagaggttgcagaaaagcaggaatgcttatactctatttgtgggagtgtaaattagttcaaccattgtggaagacagtgtgacgactcctcaaagacgtaaaagcagaaataacattccacccagcaaccccactactgagtatatatccaaaggaatataaatcattctaaggacacatacacacacatgttcattgcagcactattcacaatagcaaagacatggaatcaatctaaatgcccgtcagtgttaaagtggataaagaaaatgtggtacagatacaccatggaatactatgcagccataaaaaagaatgagatcttgtcctttgcaggaacatggatggagctggaggccattatccttagcatactaatgcaggaacagaaaaccaaataccacacattctcacttataggtgggagctaaattatgagaacacatggacacatagaggggaaaaacagacactggggcaaatcagagggtggagggtgggaggagggagaggatcaggaaacataattaatggatactaggctcaatacctgggtgataaataatctctacaacaaaccccaatgacacaagtttgtctatataaccaaccttcacgcgtacccctgaatttaaagtaaaagttatatatatacacatatatatgcatatatatgtatatatatgtatatatacatatgtgtatatatataacttttatgtgtatatatataacttttatatgtatgtgtatgtatacacacacacacacacacacacacataaccttgtgtctaaaacaattcatccactcaatttgggattgaaaatcccaatctttttccttccactttcatatatgatattctactttattgtgtgtgtgacctgattaaatactagaaaccctgatccttgaggtcaaagtcagccaaaaacaggaagaagcaaacctcttgtgaagcaggtgacccagactgcaagactctgaggactcaagaaggggccactttgggtggggcttcatcacttcttcaccgagaggtgtcatttcctgaggactaatagattcgggcattcaagtacatcagagagagaaagcataagagagaggtgacctggagaggtaaagccttgggaagccctccggagaccttgctttttctgtggatggaagaagccatgtggatgggtaatgaaaaacatagctaatctccctcactgattcaaggtagctttagaactatgcttgcacccttgggaaaagaacactaaacccttctggttactgagtacacattcacttctgggaagatcaggcaaggtgatatgtggaacaggtagagggaggtgggaatgttctccttcctggctataggccatgggactgaaagatgggagccaccataatggctaaaatgaaagaagcaacttcctattgaaaacttgcagagagatgaaagtagggccacgtttaggtgcatccaatgagccaccatcttctgaagtcctgccaggcctaagtcggtacataatcattgaagcggactttgttttattggatatttatttagcagatttaaagttcattccacagaaggtcttggtatcattttataaaccctcaatgaatactctaaatctctatgatttatctgagaatagggtaagaaataaagatagctgcttgataatttgacaacagtattctgttggtacggatgacataatatatatttttagatccatgtcattttaattaaggattttaattagtgttttttgttgagaataaaatagtatgcatccttacaactttgtcttaaagtcattgtatttttcaaggggctttctctagcaaaaacacagatgaaggtctccataacaattggtccgcttctaacctcatgtgccttatttaaaattttaaagaattgcagaattatttctcaaaatatggtctggagtcaatagcagttcagcttcacgagagcagaaattgtggactgtctggttccctgatgtatccccagcacccaaaacacgggcacacagcagatgtttaataaatatttgtgatggagtgaatgaatgattcttaatccattttaatcattgattttaaggaaatatgtcttaattgagagtttatttcttacatttattcatttttcactttttcctgccaattgctatgtagaagcaattaaaagcaatttcctttgtaaaggaaatacccttgtagcaacaagtatgtgtcccatttttgtttgtttgtttgtttgctatgagaatgctttattaggcaaaaccacatactgtgaaaatgctttaaaatgcaacaggaggagatgtgaagacacaaagaacaagtgcatagtgacacatggctatcagaacacactaagtaaagaatccacacctcttccaccctttatccagaaaaggaaggagctagatcacctcctcctcaggttccccacatctcattctagttaaagcgaaaacaaacaggctgctgttctcagcacccagtgtggaaggaatagtatatatagagccaccttgcctcagagtctgccaaaaaaaggtcacatgtggaataagacttaccttctgatttttttttcttttcttttctttttttttttttttagatagagtctcactgttttgcccaggctggagtgcagtggcacgacttcgactcactgcaacctctgcctcctgggttctgggttcaagtgattctagtgccttggccaaccaagtagctgggattacaggcatgagccaccatgcacggctaatttttgtatttttagtagagatggagtttcaccatgtcagctgggctggtcttgaactcctggtctcaagtgatcctcctgccttggcctcccaaagtgctgggattacaggtgtgagccacctcacccagccagcctacattctgctttttgagctgagtaaaaaccttttgggaaatagttctcagaggcaaatacagacatagagagcagccccattcagtaggaatacgctgtgagccacatgtgtaattttagatttttgaatagccacattaatttaaaaatcaaaaagtaggtgaaattaattgtaacatttatttcttatttaacccattatatccaaaatattattgtttcagcgtgtaatcaatatttaaaaagcacgaatgagatactttatgttacttttttgtaccaagtccacaattcagtggatattttattcttacagcacatctcaattctgagtaccacatttcaagtgtacaggctcttgtactggacagtgtcattttagaggagggcacaaacatacagccatagcccgttcctccccctgaaattctaggaacaaaggaaagctctgaaatattcctctttggtgaatatgaatagcagagatgaatgcaaaatggttgtgacccctgatcaacagtagatttccatggacagactggtgaaacgatgtttgcagttttgtgctactttgcaggaagataaccccatgtcctactgaacatttattgggcaccactgtaggctacaaaaagccctggtcttttagagtggaccatgatatggtctgagcttcaagccttgctgggggaagatgtccacttattctcactttccagtccagtatccaacaacactctttataactcagttgtagtatttattatatgtaaaaaaacatgtaataagcatggggaagctctctggctatctccatgcaagcttcatgattagttcacttgacagctgtttattgagcatctaccatgtgccaggcattgctctagccatgaggtggcagcagtgagcaaatagaccaacactgccatctttgtcaaattttattctagtgggaggagacaaacagtgaaaaacaaaataaagagaaagtaggaagtgctgtggagaaaaatagaacagggaatgaggatggaaggtcagggtccaaattttaaatagggggtcagggtcagggagggcgtcactgagagggtgaagtttcagcaaagactcaatgttgaggtgatggaacaggctcatagatttgctggaggagaattacaggtaggaacttctgatgaggtaacttctgatgaggtaggaacttcctcaggtaggaacttctgatgaggtaagaacttctgatgaggcaggaacttctgatgaggtaggaacttcctcaggtagggaattctgataaggtagcaccttctgatgagataggaacttctgatgacataagaacttctgatgaagtaggaccttctgatgaggtaggaacttcctcaagtgggaacctctgatgagggactatgtctggcatgtttgaggaacagcatagtggcctgtgcagcagagcagggaaaccaagaagccaactatttggagatgagtcagagcaagcagcaatcccagagggagggcacggggaaggaggctgtggtcatggagagttggagagggggctctcagccactgtagaactttggcttttactgggagtgcaagcttatgctcgtaaatgtagcaaaattatggtaattattagactccctgctgaatcatgtttgtttaatgaagctcgtatattgtaatcttatgtatcttactttatgcatttaaaaatattctgagaggggccatacacataaaagaggttaagaacacctctattactgggaatttgagtataagagtcttgtgatctgacttaacatttgataagcattgctctggcaaattggtggaggatggcttgtcaggaacaatggcagaaatgtggagagacactagtatgctgttccagcaacccaggagagaggtggtggaggctggactagcactggaggtcttgagaagtcgttccattcttagatgcattttgaaagcagagccagcccaaagttaggctgaaagagaggtgtgcaagaaaacagatgaggccaaaggtctgggcctgaaccactggaaggatggagttgccattacctaagacaggaaagacagctgggtggagggctttggaatggaaacagtgagacgactcttagatggccatgtctttttcatttgggggatgtagtgtactttagcttaagtttatccatatcttccacagtatcttaaatgtgttgtctgacaccagtttctgagagaggcatattaaactctaccaatatgatggtgaatttcaaactcttctcataaccctgtccatttttacttcagtatcctggagctttattgttagacacctatacatatggtattgttatatcttcctagtgaacttttattatcaaataaagacctttttctcatgatttttgccttaagatctggtttagctgatatttatatagctatgccagcttatttttttgctattagttgccattcccttttcctttcaattattttggcattacatatatttttgtaacagctttattgagatgtaattcacatgccatacaatttgtccacttcaagtgtacaattcaatggtttgtagtagagttacagcattgtgcagttaccacgtctatctggttctaaaacatttgcatcacccagaggacaccctgtacctgtcaagctgtcactcccattctcttctcccctcagcccccaacaatcactaacccactttctatcattgtaaatttgcctattctggacatttcatataaatggaattacacaacacgtggccttttgtatatggtttctctcacttcgcacaatgtttttaaagttcatgcatgttggagtatgcatcagtactttattttcttttatggctgaatagtgttctgttgtatgtatcaatcatactctgtttatccattcatcaattgatgggcatttgggttgttttttcttgggctattgtgaataatgctgctatgaaaattcatgtacaggttttgtgtggacatatgtttttaattcgcttgagtatttttctagtgcttttgtggtcttgtttgttacatttacatctgtaatccactgaactagattttggtgtaaggtggtcatataacaaccaagttcttatctttcacttaaaattgctcataaacattaagatggtattaattgttcatctttttattagttaattatagatacagatattgttctttgcaaatatgatactttgttcataatatggaagcatgtattaaaatttaagcacagatgttccctacagttaaaagttaaatagattaggatattttattgtatcagcacgaggaggaatggcattgtcccattgagtaataataccctagtaactgcagagaattcactgcaaggctagctacataatatacaggacccattacaaaatgaaaatgtgaggctctggcctggtgtggggcagtcagtctctccttcccatgggctccaacccatggcaaacaggcatccaactaagggcttgcaacctctgcaccaggatgcactgaacacctgggtgggggatgggtaggaggtccacactgagttgctagccgaacacgccatggcactgcctgcccaaggtggggacagccacccccttggtctgaccagagactccatgtgtcatgtagctgactcatgagcctctctatacccttgtccaggaaccccactgggtgttggctgaacacgggcttcccccaaccaaagcaaccaatgtcgctcctggcagaaggaggaggcagctgtcatgaggcaggaatggggaggctgtctagggcccagggtgccaggggcagggagcaggtaggagaaaaccatcatggagagactgtggggatcacacgtgagcagaggctccaaggcccctgacgtgctccattgtgtcacttaacttcacttaaaagcatgaagtcaaagataaaattattaagaatttttgaacggtggcctcagagcaataaactctgagtgtgaggctctaaaaagcacacagcactgtgctgctccctgggtcccacactcatgaagccagccctggtgcaatgtgacttctttgtaacataatttaaaaattggaaggattttgactctgtttatgaaataaatcatagtgctattttaaattaaatgtatttaaagtatctctgtgttgtctttggttaatggcattatcagtgatatttaccttattcttcacacttttttgtgtttcaggttttctataatgaaatgagttacttttataattactcaaaccccagtgttatataaacatactttactggatattattttatataagtgtgatatattacaattctgtctccatttggggggaatacatatttagtactttaacttaaaaatatattcctctccttacccaggtccattaatataagatttgccactctcttggatactcctggtgtggaaaatcttgtcagcaccctcatgttgaataaaagcatattggaggacttagaccgttacaacaaggctcgcaaagaccctgtaagtacctgttgtgaccagacctcaggatatgggaccattatgatgacccatgtagattcagccctgaaacttccttggatctgagttggaaaatcatatggcagggggcagtggaggtagagttagaagatgggagcaagaagagaaaactgtggagactggggcttgaggaagtgagaccattctcagtggggatcccccagagggatcagatacccaaaatccttctcaggaagatagaaaatttggacttgatccaaacaatcatatcaaaatgagatggatcctagtctttgggataggtagatacagtatgaccatggttagggaagggtagcttaggaatccatgggtatctggtgcccacctcagcagcactgggtaccagattgagggtagtgggaccctgtttgagcctatgagatgatgagtctgaccagacccttttgttgagctggctgcatcccccaggattacatgggctgggaaagatcctgcatgataaatgttgggttctctttctagtgtagtaatgcatgtatgtgctatggcaaaagtcaggcttgtggcagtctgtaaattaatactgctgtcttagggccatgacagttaatctgactacacatggaaagatgaaagaatattgtgcatagtcacttttttgatacattttattttgaaaaaaaatttattgaggtataaccaataaacagtgtgatggatttcacaatttgcatacaccatgtaaccagcacatgttttaagaaacagacttaaccacagcctgctggaagtcccctgatgcctctactcaggcctttccctaagttaataccaccttgcttctaagatcagagattggctatgcctgtttttgaactctacataaatggaatcacaccgtttgttttctgatatcaagtttcttttgctcagcaatgtttgtaagagtcatccatattatagcatgaggtatttcatggcatgaatataccaccatttatttcttcattctactgttgaggtctttcagggagttccagttatttgctcttttggaaaaaaaccttttagttaatttttaagtcatcaggagggagacgccaaacacctaaacataatgtcatatacacaaatgtttactatttataaaggcatcagagtaaattgaaataaaacttcccttcagcacatggtttgctttggtttgtcttgcactcttttagttcttcattttttgctccttccctcctggccctctaagtggtatgaggtcaagtcctggttctcaaagtatggtctaaggaaccttgggggtctctgaaacatgaattttctgggagtctgcaaggtaaaaactgttttattccttttccactgtgttgagatctgtacttacgacgcataagtacatatgtacttatgatctgtacttatgtacttatggcattgggtgaaaccaatgccacctcagagtaggtcacggaagtgtcagcaaacgtcctagtggtcctggtgttcttcaccgtcatcccagtaactgcagaaagagcaaaccacagtggaatatccctgcacacctatcagaatgactaaaacaaaatagcgatgccactagccgctaaatgctggcaaggatgtggggaaactggatctctagtgttgctggtgggaaagtagaatggtgtggccactctggaaaatattttggctgtttatttttttatttttatttatttatttgtttattttgagacagagtctcactcttgttgcccaggctggagtgcgatggcgcgaccttggctcactgcaacctccgcctcccgggttcaagggattctcctgcctcagcctcctgagtagctgggattacacgtgcctgcctgtaatttttgaatttttagtagagatggggtttcaccatattggccaggctggtctcgaactcctggcctcaggtgatctgcctgcctcagcctctcaaagtgctgggattacaggcgtgagccaccgtgcccagcattgactgtttatttaaaaactaaaactgcaactatcttatggcctaacatttgcacttgtgggcatttgatccagagaaatgaagagtttacactaatgttcatagcagctattgtcagcaaagatatccttcaacagatgaatggttaaacacactgtggcacatcatgtcatggaatactactcagcagtgaaaggaatgaactcttgatacatgccttggcttggataaatctccagagtattatactgagtggggaaaaaagccaacccctacaggttgtatcctctagcgttccatttgtatgatactttgaagtgacaagattttagaaatggagaacaggttatctgatgccagaggttaaggatgcggggagggtggggacagagggggcaactcaagggatgttgtggtattagaactgttcaatattctgactatagtggtggatacataaacctatagaggtgatgaaatcatgtgaaacttcatacaccacacacacacacacccccacaattgtatcaatgttggtttcctgcttgtagtattagactatggttttgcaaaatgttattattaagggatactgaacaaagtgtacaagaaatttctgttttatttcttacactgcatgtaaatctacaagtatgtcaattaaagagaaagaaaaggaaaagccagtttcactaaggaatatccttgatgaagcagtaaaattattaagtttattaagtctcaaccctgaggccaggtatggtggctcacgcgtgcaatcctagcactctgggagcccaaggcaggtggattccttgaggccaggagttcaagaccatcctgggcaacatggtgtaacctcatctctactaaaaatacaaaaattagctgagcatgatggggcacgcctgtagtcccagttgcttgggaggctgaggcgcaagaattccttgaacccaggaggctgcagtgagccgagatcatgccattgcactccagcctgggcaacaagagcaaaactccatctcaaaaaaaataataataataacaataataataataatatctcatagggttggtgtgaggatccggtggacatagggaaggcgtttaacttactacctggccaaaagtaggtgttgatagatgtttgttctgttgttatgtgaacgtggttaagacccactgttgcctgcttacaaaaacattcatagccatatttttaagggtcttaaaatatatgcttatcttttcaggatggaacactgctgcaggcatttgtagctgaagttgcagaacaaatagttggtattgcagtgatcagaaatgaaatggtaaattgtgaagtggatataaatttctttgattgtgccttgctatatcatgaattagcccacagtgccccttttggagttgtacttttacttatttaatgtgaatgcctcctttttctgatggatatcatcatcatctgcctctatcccacttgaaggacttgcaattctccatttttttgcagttcagaatatttaatatattacaaagaccacatgaaaacattctcaccctaaaaactcagatagctttccaccacctatacatatattaatatattccatatattaatatgttctaagtattactactgtagtgatgcatttataccttccagcattcttctttgcactttattacatatatcgtgtgtgtgtgtgtgtcaaatggaaatgccattttattttttcccagtgcacagccagctatttcaaagcatttattactgaataatccattcgttcccttttgattttaaaatgctgcttttacatttattaagtttctatatgcctatgtctatttttaaactctgttctgttccgtggatttatctgttgatacctattgcattatcatgtgcttttatatctaataggggagtgttctctcatttggtgtcttctaaattttcttgttttttgttcttggttatttcctctcccaaaccttgtaatatttattattaatataattgtacctacgtggattctatagaacaatttagggagaattgacattaaaatatagagacttccctattaggatcatggatcatggctttctatgttgttgttgttgttgaactttttgggttcttcaaaaacgtcttgtggcttctttcatgtggttttctttgcatcgtattttgtgccatatgagtttttgtttgtcctgtgggtccactctccacctttctccaccctgttctgtctcagggagcctgactgatgggcacagcattatgggtacctttgccttttggctgcccgttgggtttggtggatggagagccctgacagaaggaggaggggtcagtgatgtcaggtgcctcagcaggctgattgccactgagttccctgacatttcaaggcagcctcttcatgatactcttttggattcctgtaaccagccctcctcccgcgccaccctcttagagtgggagtagcttgtagttgctgctgcacagtccctacttatctccttacacctgccccatccttgtaaatattacctttgttaaaccgccctccaattatcctaatctgatcatactgtttcctgatgagaccctgacctgacacagttctagacgttgatcacttatttctacgtgttttgtgatttctcttggtattctgagtatacactttttctcatattttctaaatgtttgtcttgtgtatggaaaagctactagtgtttgtattttgatcttgtattcaatcacctttatgaaatatctttgagcttggagagtttttcagctgattctcttttctgccacagccatcacctccaccctattctactggtcagaccagttagagggcacgctcagacacaaggggtggaggcagacttctctcgatgggggtgtggcagagtcactttgcagaagagcatgagggatgtgggatgacaggtactgtcctggtggtcatcttaggattctttggataagagaacctgctacaccttccttttcactatttatacctttagtctttttccagttttagtgtatggatagaacaacattgagtagtagtgttaataatagctggctttctggtgttcctgattttaatggaatgattctacactttccttcatttagtgtaatcgtggctgtaggtttctgatagatatcccttatcaagtaagggaaattttcttctctttctatcttattaaaagtttttattatgaatgagtgttgaattttatcaaatgtgtttttgacatcgagatgttcacatggctttatttctttaatatattacacacttttctctttcttagatttattgcactttttgatccaatatttcttggagttagttaatcttttagagatggtgttgggtagtaaggtccctgagtctacacaaatatgataagttttcattggtcctcatacttgtatactcatttggctgtgtgtagaattctattcaaattattataataattattattattattttggaaatggagtcttgctctatcccctaggctggagttcagtgatgtgatcttggctcactgcagcctctgcctcccgggttcaagcgattctcctgcctcagcctcctgagtagctggaattacaggtgtgcaccaccacgcacggctaatttttgtatttttagtagagatggggtttcaccatgttggccagtctggtcttgaactcctgacttcagatgatctgcccccctcaacctcccaaagtgctgggattacaggcatcagccccctgcgccagcctcattctaattatttctcatcagaatgttgtcttccagtatccaatgtcattgataaaatataatctgataccaacctgattcttgatcctttatgaataaatgtgtgtttctttgctctccttcttgagaattaaattttctttttgtatctggaattctgaaattttgccaagaaatatcatgtctcttttggcagtttgtcttctatgatttcattaattatttcttctcctccattttctccattcttcttttcttaaattcttttttagatggatattagatcttttgaattgattcttcagtgtctctaaacatatatatgttacattttactcatcattttagatttcctcaattttgtcttccaaatctctaattcttcagttgtgtttattctattacccaagtattctattggaatctttatttcagagttcacctatttaacttccgagtctctttcttgttctcttattgttcctttttggtatcagcttgtttattacatgtaagatcctttttgatctctctgagtatactctgtagaatttttttaaaaattctctgctatttccttaataatttgtcttctctgcagtaagttgtatgtttctctatgctggtctttttttatttgtcagttttcctcaaaagtctgtccatgtcatgagtgaaagattaaatgatcaatttgggtggctggcatgggtatccttgacagttgtgcttgtatgtttctccatggcatctcccctgtcactggtaatgccaccgcccctctttttgattgggagggatggcagtatctggcttccccttgtgtgcttgaatggagtaccagccggcaggcagggactccaggtgacccaaggtaagaaggtttcacctagtggtagggtttccttccagtgtaaaactgccttacttttttgtcctccattatgctctcattacaccaaaaataatttttgttgttgttattttaagggatttgggatgggaagaaaattagatgcacatggcccatctgctgttttgagctaataacctctgttggctctttgctttttgtttttcagtgatttctcagccctatacttatcactcattttattttataatgagagatgcctccttggtaattaaagaaaagtcttatagtataaaggccattacagggtcaatgcagattgaaaggttgccagaactgccctagggttccgccactggcccggttaccctgagctctgtttcctctgtgctttgtgacagaagctggaaaggcaggggacctcgaggagcttggccacagatgccacagttttcatggatttgctggtgccagccttgctgatcacagaacacatcaggggccttgcattctccaatttctgttcttgaaagtaggcttttaaaacaattttactgtggaaaacaaggagaaatataagttggtgttttgcaacctgcatatatgatttgatttttcctgcattttgggtgcgtttactgctgctgtcatcagagagtcacactcaccttggagtgctcccctccccccacgctcctgacagcatacactgctgggaggtgacacaggacaggctggcccagggcacagttagcatggagacctgggatcccagtgcagtgtggggacagaggggggaccagaactgggcctgtggaaacgagcagtgtgcctgatatttcctttacatgggaagacactcatcagtcctttaaattaccttcctctgtaaaaatattacacatcaagggggatagaaggtttaagaagtgcacagggataaggcccaattacgcagttttatagcaggccagccagccatacatgtaatcaaaatgtatgatatggggccaggcatggtggctcacacctgtaattccatcatttgggaggccgagacaggcagatcacttgaggccaggagttcaagacctgcctggccaacatggtgaaaccctatctctactagaattacaaaaaaattagccaggcgtgatggtgggcgcctgaaatcccagctacttgggaggctgaggtgggaggatctcttgaacccaggaggtgaaggttgcagtgagcgaagatcgcgccagtgtattccagcctgggtgacagagtgatactgtctcaaactaaacaaaacaaaacaaagtgtgtaacttgggggtgacacatttccacactaacaggtgaatagtaatgcatcagagaacaccagtggctctgtttgcccgactcctgaatttcccacaggctccgtctcttgtgctgactggcttgtgctcacatcgcctggcagtgtcacggagctgctgtcctgccgcttggccaatggcacagactcggggctctctgagttgatagcagccatgggtatggaaggagcacattacaagctgtgctgccatcccccaaagacaatccatcagaacaactagcactcaggaaacgtaatttctaatttaaagaatttaccatggagatgaggtggcaaatatggaagagaaaaatacgtttcttactatcatacctaaagtaatttttaaaagatatttatcacaaaatgcatgccgtttgtttaaaatgcttgtagaaaccatcccttctgtctcttctgtaggacattgagtacatacggtcccattacaacattgaagatttcatctacttcagtcaccaccagcgcgaagaacacgggcacatgcatcactttgccctcaaccccattttccggcactacaccaagttctttctgaaggagatcctgcgtttaggctttaaatcctgtctctactaccgtgtttacccaaaatccagagaaggcaaggtaagagaatggtgcaattcactttcccagcaggtcaacgttcacagtgttgttggtgttgtacgccgcattctattcattcctctcatgatgggttttgatgataacatgggtctgaatttccaatggccatatttagtttggcctttttcataaactacagtgacattctgtaggcttcgaatttctgacacaatcacaactaatataattggtagtacaatatgttggcttttctatattgacaaaatagagactgaaaactgtgcagaaatgctctaagagcatgaagatctaataatttcttatgatacgtgagtacaatgccaacatgatcctattctgttccttcaagccaagaacatttcagtgatgaatccatagaataaattaattctattttagaagactggcatgctatcccagcattccaaataagcactatacacacccctactaggtgatggagagaaagtgcggagatgcctgatgccgatgtaaccccatgtaacacttgccacatttgcatggagtaatactgtggtaatagacgcgaatctgatgtgtatacatggtgtgtatgtgcatgcacagatagcaagtcctccatcttacttgcatacctcccatcccactttagtgttcctcatagcactcaccaccaactgaagttatctattttaccatgaacgcagccatgcttttatctgtcttgttcaaagctgtatccccattgcctagaagagtcacaaacacacacacacacagagacaccccacacactctcatgcattcatgcacatataccacactctcacacacactcatgagttcacacatatactcacccccctcccccacacgcacacactcacacactcatataaggtgtctggttgttccacaggaaaaggcctattcaagatagattcccaagggttttttttcctgaaaattggtctctcagtcactgacaacattggtcctcaacttgatgtagacttgggggtgaagggattcaaccactagaacaggtagaagttgtcccgtaagattccactcatgaactcaaactttcccatgttctgcctagagtctttgacattgtctcatcagcacaagggagctaagggatcttaaaatgccttattattaatatgtctatttattaaacaatctaaagtgtgttagtacatatacacataacaataattttgccagtgtattttatttaacgaaaaccttttggagaagtccagaaaaccttttggagaagtccagagggaatggggaagaaagaagaaaaacagaaaaggttttgagtgagatgtagactctgctctagttttttttagtttttgttttttcctgtcaaaatgcagcaccatggcaatgaaatggcccagctttgaactcactgagatgggaaggtaacagttctgctggaaaatcctggtcctgcacagttttcttttactttgcacttggccaaatgccagttttgtgaccttcaggatgtgatattaaattcttgtttttattcatgaagttgcctggatgttctgggttagagaaagtccatttgcatccataataaaaataataccttgggcatttcattaaatgtttatacatttacctcaatagtatgaaattaggaatatgttccacactgttgtatgtagcctctaaaaacatgcttggaaacagatttcttctcagtctgcccttccagttgatttcacatattcatttaaaacaagtgtatgaagcagttccaaataatttgggtaagaattcccaaattctgctataaatctccagttgactacagtaaagttgagctttttggctcacattatggggatggttttctctgtatccctctggtcagggcatgtattaagagctcttccaggcataaaaacagggtgctggctagggttctgtttttcagtttgcgaagtcacggtctgaagtccagtggtgaaggattttagaaaaccattttagaagctcttagaagggccggggctatttttagaactgcaaaaaagtcataggtaaaccatctatttattaaaatgcatctacagttgtttttctgtctttgctttccagtctaaattcaataaatgtatcattaaaagttttgattttacagtctaactcttcagatttaaatggttacgatgtccttagttcatttcaccaaaacccctaagatttcataaatgtgacagaaataaagatcaccatgtttggttttctctgctaagtttttaaaactggataaaatcaatatttaaagcattcccctaagacatgatttatcatagttcatttcaataagtataaatccaactcataatttagtattagtctagatgtaaataatatgatctacttctcccacacccacccccacttcctagttttatctttttgttctaaaacagtttttgttgttgttgttgttgttgttgttgttgaacaaaggtctggttgaagtcactgtgagtgacttacaaacaggaggattttcacatccctgctaagttaccccttggatgacatttttatctatgtgtcttcttaaagcagcttgtgccaaacatgcaaaggttaacaggatgcagataacacagcttaatggggtcagatcaagctgatgcatgatcactatggagaagaatatcctcccggggaaaatacttgtactgaaaaatcccataaaccaaaccacttgtttatctgtcattcccacagagatagtaatgtaattactctcgtaattatcttcattagtgtcaggcattatctacaattcattcctctgctcgaagagtatgtttgtttatttgctgatttttttttttcctctctgacttggccgagttaagagttttgtatttgtaaagctgtacgcagacatctgtgctgagcctctctgacattctctcccctaaaatatagattgctgtctttcagttccagaacccctacgcccactccctgacatctgcccttcattacttggttcccgtgcgaccacgacgacagattgtctatcctctggaaaagcttggcataaacgctccatcaaaggcggtctccaaggatccggtgggtagcagggcggcaggcagggcggcgcggtgccagctcccgcgggcctggcagatggggtggcagtgctgtcttcacaggagcaggctgcttcttaattacagggaacctggtgctcatacccttacaggcggagccccgcgaaggctcccctgcagccctttccctcaagtcgttatttcccgggaagcctaaagcagtagccacaggaccctgcagggtcatgccatgaggatacctctcaggctgctgtgtcccaggacaaaaggcctagagtcatcctccagcatattttcattttctttccctgtcctcaaaagcagattccccctttcaatgatgttttgctttcaatgcattaagtggtcattcgctgttaggacaaagctgacagagaaaacagagctggctgcattcgagatgtttgggccccgggtcctaagctggtttgtttaactccctcctccatttgaatcaagatgattaacagaagcatatgagctgccctggggcagcaggagtttctgaccttaaaatgaatggccaggggccacttttattgggagaacaggaaaaaggactgaaatcaaacctagatattctttataaatggaaatgtacctgtatacatacacacagttttttcaataacttaattggaaaacataattttctcatgttgactgatatgggcttgtagtgtttgtatactctttcacttaagtaagtaaaaaaaaaaaaaatccctcagtgggctaacatttgtcctttgtgagacaggaaaaaaggaaagtgtaagtttaaactctccaaacacttacccaaggagctgcccctcagagctggagacgatgctgaaataaacacctcgcaatacgctcggcgctgcaggaaggacatcacccgacccagagcctgtcttacttgtgcgtgcactgagggatggggcgtacctccatcagaccaactcagaggcagctttgcgggtgcactgagggatggggagggcacctccatcagaccaactcagaggcagctttgtgtcttacattcatctttatatttgtaaaataacaaaaaatttatatcattgtaaatttatatgtgagtagagactgttcatataaagcaggacttctcaatctatctgtcctttttttaattaatgtgcaattagtcatggactgatagttttgtaaaaagtgaattcctgggaaaacaagattagaaagcaaagacagacaaaattcttttattattagatttaacagacatagcattactctgctggtttgctataaaagcttctgaatgcttctctcggtctctcttactcatatcttcatagacttgtaatagtttgcacatgggcacctgttccagaacacagattgagtggcactggaatgcccacgcactcagcacccagctgcaatgatttgcaactccttagctaattttggatgatctgtgcccccaccacttcccctttctcctatatcattttgaagcaaactccagattcatatcattttatctgaaggtcacaggcatattcttaagtagcagggtccacagcactggagatgagacgtgcctagcccacctggaagacatttgggatgggccaccatgtggtctgtttgcatgtgaagatcctgggaacagactgctttggaaagagagccaacacccagaagtttggtgcaaagacagtgtcttggggtcagagacagtggctacatgctgtctccaccactgaaacacagtttccacagaggcaaactgatctctggagaaggcgctgggcatagaagtacatggatgtgccaggcgtacaaccttgcagcttccgtatcagatcagggtcaggatgagagatgctgaccttctgcagtcagtgctgacacttatacttcagtggcagcccacggctcctgcaccttcagccagccctctggcagcgtgggtggcctggctggagctggagggaggagtccagagctgctgcgtggatatcaggaagcatcgtttttatgaatatgaagcagttccacacctgccccctccctcccaccctactgtgagaattttcagttaggtgactttgaggtgagttggagctctaggtggggagaaagccagagagaacattttatttcatttaaaattatcttattactgcttcccaggttgctatgatccgaaaccattgcttacattgagtaaccttttccatgtttatctcagtatgctgtgcccctcacccctgagccctggtgtatttcagcacaaagccaagatgtattgttgaaacccagggtccaggaagacagccacttagcaaatgggtgggaggattctaacacagatgcctgctacctgctgctcgtgctattgtgcttatttcacaggtgaattctgactgtttaagaagcacttttattgctactcattgtactcaagcttcagaaaattgtaatggagatttagatttagtaaacaagattcagtgaaaaattttagacatattaaaagtttaatcacaggattatttatcgagaccataatccccatggaatgggcctcggtattaaaaagttaaaatgctaaattatattattaaaattatttttctctttttaacattttagacagttttaatgttttagagtgattatctgacacaagttgagccaagtagaatatttttaggaggaatctcagtatagccctcaagacattgttttcttagtagagcaatagcattgcagtagcaaactgtgcaaggctgagcaactgtcattaccaaatgaatgaattttccctttaggtttcacatctcccaccgcccccccgccacaacccctcccagtgcatcaagctttatatgagaccctcagctccctcaccatgtccatatcatttctcttgctggccactcgtctttcataccttttatcctatttaaagcatcttagagtgaccatccagtccctacctttcacctaggaagccaatcttcaagggaacagatcactccaggcatgagtaatgggatagaaagcatttcatctcggtaggttgccaatttgaatctggcacaaggaagcagtgattgaaattcatcactgcatggcagggaaatatgccctcgctcccaccccaaggccttcctaattcctgcctggtttggacgatcagtgtcccggccacaacaccttccccgtcgtttctattaattgacagcctaccccgcagcaggtcataaaaaagagcctagaaaacataaatgattttcatcacacatttcagaatcaggcctcaaagattcatagtaatgtctccacagtcaaccagtgtgaatgcatgggtaagagagagggctttttcctgaccaagaccgtaattgacatcatagacctgaaagattcttttctgagcttgaatgagccatcttggcctgtgcttttacattaggagagttactctcatggaagtttttattagatgactcgtcagggcctgcctgcataagaattattattttttacaaaattattttatttctttaatttttagtttttgttggtacacagtaggtatcgatgtttatagggtacatgagatattttgatacaggcatgcaatgagtaataatcacatcatgtaaaatggggtatccatccatcccctcaagtatttatcctgaatgagtattatgatcaggaaaacactcaaaattgggctgaattaatttagtggttatattgattaaagacagccgaacaagctgccttacacttattttgagggtgggtctacatacaaacctgttttctttcctttctgccttttatagggattcagatatgactgtgtcaccatccatgcctgcatggagcttccagtctagtttcagtattaaatgggggtagatgagggcttgtactggcctcctaggtgacacgagcccaaactcaggagaaatagccacactgggctcagacctgtttctgcagaattcctggagagggaatgtgtttgagaaaaaggcactgcttcctttccaggaatgggagtttacacaactgttatttgtcatattacactccagaaaacctgctttgaacttaaagagcccctcccattgcctcaatgtcaatagttgctccccatcatccacttcagtcacttcagctcttcatcttggtttattgtgttcatagaattgtagcgtgaactcacctctctctcagttattttcagaactaaatcaacccttcatccttcctgagcaatcatactttcagagtgatcttgtttttttctggttgcttattaatgatggtctgattaaatctcaactaatgaattctttggaggcctccatttggattctgtgcattcatttctccacattttttctttgtccttctacaaagaaaaatgacggcttatggagcccctccccctcagagctaagtgatggccctgctttttcctggtatgtgatctctcaggaagatgtcactcactggcattcagttaccctttgaattgccccttttcatctggctgttcttcccagtccagctataattaccatctgatggactgttactggatactgtttcacttgtgcatctgctgccctaggaaattgcattattctcccagcacctgctagattttccccagctttattgtttcccagccccttccttaaacttggtaactttcaccgccagtggttagacttcccttggttatatttgtggtcggggtatgtggtgtgtttttagctctttggccatcaccttggtagaggtttctaaaaaggcagacctgtattttttcagcatcatatatgctctaatcattattaatgtgacgatgggaggcatattttcttgaaatgaaattaacccactttaaatcatcgccatgagtccagtttgctgcttcaagccacttcccagccagttcctatgtgtttacactatctatgagaagtgcatttccttctacttatagtgaactcttttctctcagattcttgggatcatttacataagttcctttatgggctttcttctttctacaatacaagttctgtggccatttctttccaattctctgaacattgtctagtttaatataatatgttatatattatataagtgtctattatatgaatagtatataaatattcaccagaaggacttataaaccagtgtttattctcattactgtcctaatttttcgctcttagaaaggttacaaggtaataaaaacaactactgttgcattactgttacttcctgagctcttgcttaaagaattcccatggagtttctcatctagtcctctcatcagcacatgtaaacagttactgcaattaccatcctcagtgtacctaaagcaaacaggcttgccaggagagcaggtaaataacttgtccaaaggcaaattaattgacagagtttcaaacccaggcagttggttgccaaaactcctgtctttaactactacagatatactttcctacctaaaggctgaagtactaatatgactcatgataggaaaaccaaactacagaaaaggaatatggcttgatacagatcttgttgaacctcacaagtccttggcaccaggtacttaacaaaaaggtgacccacagacgattgcatttctcccagtgcagtttgaattttcctcttggctgaatcatccactcttgggtttgatctggtaccagcctgaccctgtctgacctgggctaggaaggaacagacatgggtccaggttggtgtgctggcaggttttggacacctgctgattcaggctgtctgcagttagctctctgctgtatgggtttgttgttgcaaacctttgtaatttttgttgttacaaaaaacctttgttgttacaaaattatggtggcagctgctgggaaaggaagaaaaaaattatgatcccatatggaggctacattatacatttcccaagattcagttccatgttggatgtggtttcagaacccaagtaagtgcccatcagatgagtaactacaggtttattttttggggtgggggttgggtggagggaagagacaggatgtgaattactggcatgatcaacaagctgtggaaattgttgagtaactgggcagtggtcaggtggcaagatgaggctgtaaggatatgatagagaagaaactgggaagagtaacttcttaacatcttagtgttgtcaggaatcgatgctacatcttatcctcattttctaggacagatatttataggacagtctctctcttcccacagccatgtctttaacagcttcacattgagatataaatcatacatatacaccatacaattcacccacttaaaccatacaattcaaaggtttttagtatattctcagagttgaacaaccatcaccactatctaattttagaacattttcatcacctgcaaaaggaacctgtacccattggcagtcacttcctctctttcccagccctctgctctcagccctagacaaccagtagtctacttaatctctctatgaacttacctactctggacatttcatacaagttgcaacatatactatgcggtattttgtaattggcttcttagcatgtttcatccacgttgtagcgtgtgtatctgtactttatctcttttttattgttgactatcctattgtgtggataatactatattttattttttcatgcatgagttgatgacatttgagttatttccactatttggctatgatggaaatgttgctatgaaaatttgcacacaggtttttgggtatatatatataccatatatatatatatgttttcatttggggggcggtgtctatacctacaagtgggactgctgggtcacatggtaactctatgtttaatattttgaggaactgccaaactattttccaaagtgactgcattattttgcattctttcattcttagatcagattcggcattctggctaataattgatgaagtgctggtcaaatcaaggccattgaagggcaatgtctcaactgttctttcagtttcagaagtagagtttccaccactccaagagagcttcatacacacatttgagactacactggtaatactgtttcagttcttttgaaagcagagatttttctaaaataaaacctctgttagctttcctgcttcaccctctctaactcagcagcctcttgtggtcctgtgtggacatctaagagagctcaggtagcaaacaagatgcccatccaaatgcaggaggaaaatgggggactttctgtttttttaaagccaccagcaggttctttgtttgacccacctttagtaatattattgctgttaaaaagagctgccactgcttccaacagaaaagaaaaaattctaaggatttcctggatgctgatcgggttcttgccacaacccagtagggggaaaaaaaatgcattctcctccctgcagagccagggtaatgaatgccacagaggtccagaagtgcctccggacgcatcagctgcctgctgcagagctctggaagcctgcagcctagcaaggctccgggtggagctgagctcccaggcagaaactggccgtggcagctaagtggcttcttcagaatctgcctttagggaagaaaggaatggcagctccaacgtgaggctttgctttgtgtattttaaagtagctggggatataaaatgacaaagaggacaattagagctgcagatactgactagagaagtgacatcttttccccttgattaaaaataaatatgttattacaaaagcaatctatgtttttggtagaaattttaggaaaaaacaatagagaaaatcagtaaaaccttcactcctcctatcttttgattacctttgttaatattctggggtttcaacttctggattattttctgtgaaaaagactgcatatatgctattagatatggggttatagtgtttgaaacatgcctcttcacttaatatgttatgactgtatttacttgttactaagtattgtaaagtgtgattttcgtggccacacagttttctgttaagctgcaagccccgctgctcagtgagtcctttcctcctgcccggccctgcattacatcctgtcccggatgatctcctttcattctcacagatgtttcagagtcatcgtctccattttgcagtggggaaaactgaggttagtagaggtttggtaatgcaaatgagcgttaagccagtaggacttgtgtgaagtcataaagccacttgagttctgtatctcatcgtcctgtaaatatgttctatgtggctgagttttctcctgcacccagatggaaagtgagcaagttctgggaccttctggtcaattctaggtcattaaagctgtatgggtcacttccaatcacaatatatgatcttaattccataaaatgtccaatttcattttatgtaataatcaaaattcaattttcctccaagggttagactcccctgacccgctgctgaagcctgcagcacataggaagcctgtggctggagaaggcaggatggggagggcctcttgtctcttcctaactctcgtgccccttccacttagcatctatatagcttttcagtatttagtgttttctctttctttagcctattagtgtcttcttattattgagttgaatttctagtctttctgaaattggggtcagggcagggaggaacagttggaggaggaggcaactccatgatgcaggagatgccatcctctagctttgacactgagtctcatttgcccctggaggtgccccataggaaggacctgcgagaagagctcttgcctctgtgggtcagcaggttctgcccgtgcaggccacctgcccttcagctcacccagcacatccatccactgtgtctaggggactcacatgaagctcttggagggctcccaaaccctttctgtgacttaaagcaaaggacaaggcaccccctccatctgtcctctttggggtgggggggcatgggactcacagcacgtcaacagttctcctggaagaaatcttcaaaaaagccccttctgcatgtactcatctaaccctttcatgtcttcattataagttaggagttaaaaggcatttaatcggtgcttgccactgactttggcatttttataagggggctcctttggaatgtagcatctattttcttcatgccgaggccacacagctgctaagtcacggtttggggactaaacagtgtgatgtcagagcccacgattcaccattgctgtgtgtaggccagttccctcatgttggttaagtttttatcccaatttttatcacgatgaacagtgctaccatatctgcccttattatttttcagcacatttgttttgatttcctttgaacaaattcctggaaatggtattgctcagtcaaaggtaaagttactatctctttaatcaaaaagcataaagttttagaatttgaaaatgaaaacttgtgattcctgaattgaaaaagatgatttctcttggcaatatgttgctttatctaagcaacatacagagtacagagatatacaacaaaccctcttttttatgtcagatacagatttttaagacaagtaaccaggtgtgcaaaaggatacatcttttattttcctatttttttctaattgagctgagtctctgctttgagcctttattccacctgatgggagtaaaagtaacctccatcaattctgggtaaatttaatcatttaatgtttacattgagtccatttgggagatttcttctttcatgtttttaggcaggtaggaaagacatccaagttctcaggagctcatggacatggaatgtcatggcatcgtggcaggcggggaggaggctgggaggggaggtacctgctgcttgggtagtgcctgtcctcacaggaatcctgagttcagaacatcagcttttgtcctcaggcaaagtcaccccttgtcctggcatccaggcccccgcagccctcactgcttgctgcagaagaatcccatcctcacagccttgaggccagtctgagtgtggccttgtgttccctggagctacgtgctctcttcctctccgctttccttgctttgggctttcagaagctcattgctgcctcatttccttcctcatccaggaagttccctcagccatctccactggactcttcccaggacaaggtggcagtagagtctcccttgtgaggcagtctccttcctgtattctccaaaatctttgtagggatcctgcccccttccttccactttcctggccttagccagaggaaggagagggctgcgctgcactgatttctccttcttcccctctggctttcctcctcctggtcctcagacagtgggctcgctgtccccatgtgttcttctgcatctgtcattggaagcatcaactttgacttttgatgcataacagtcaggcttttcagactcaaaaaaccttcttgcaacccgttatctgcctggaaacaaaacagcacagaattgacgcatttgttctctggggctgggtctgcccaaaggcctggtgtcccctggctgttgcctgcagcatcaggaggggtcatgagtcagcagggattggcagaaatgaaacacatctgctagtacaaaaacaacaccccactaggatgacagcagcgacagacacatgaaacacagaccacgaatgcccctctggggctggccgactccctctggctcatggaagaattataaaaatgtgattccattcattatgaagtgattggaggtcagtagatgcatatagaataaagtacagtgtcataagcctaactttcaggcctttttattaaaactttcacttgttacatcccgttaataaattctagttttacaaatgggatatgggccaggcacagtggctcatacctgtcatcccacactttgggaggctgaaataggaggatcacttgaagccaggagtttgagaccagcctagtaacacagtgagacccctacctctacaaaaaataaactatttaaaaaatgggttttgccttcctggaagatgtgaaagatcaggaaaaacaaccgagaacctagagaggttttacattcaaattaaactgagatggattaaaagccttccacagtttagtaattttcctaaagcaatttgagtttggttatctttatttgcacactcatcaaatccagagggaaaatggcatttgagttcatcagaggcagaggattaaatgggccttggaaagtgcagtacctggttagccgggggcgcggtcctcccaaagggctgccccacgtggccttggtcgagtgggcagggactgcctttcacctctgtgttccattagagaagcagcttgaagcccacagtcctcagttctcaatctgctctcattctccagggttgagccactttaagtatcaaaacttttagtctgaatgttgcctcaagaccattaagcttagtcaagatgactgatgtcatgatctccatagtaaccaacttaataagcaagaagaaaatacaaaagatgacttaaaaacaggggaaaaaaacagaataaataaggtatgaaaatagcatgggagccataaagattttttttactgccactttgagatatcaaacatgactcagctacagtgcaggcaggcatgagccatttggtccgtcgaaacccatggcaataaacataaattacagactgtgccacattcctacttcttgtgctgttcaattgtgtcccaggttttgtttgttttattttttcatataattcagtgcattgaaattatcaccatggtagtcactgtaattgtggtttttatggtagtttatgtatttaaccaaaaagagctgtgcttccagggaacaggtctcaggcagcactttccagtcaccttagcagagctcctctctcatgcaaaccacccctcccaccgcccttcacggatctgtggggacagcacttttcatgaaactggagttgacggttgatttaaaaaatggatttgagtattatctgtcacaaatcacagttgagcaggtcccaaagatgggctgacaatgtcccatagaattatatatcacaagtcttttgatttgtttgcagacaacatcgatccccacacactgggtctttggtcaccgtgtgttggtaggaccgaggctggcaggcccctttcagaccatgtgacttctaacagctcagtacttccaccaccccattcaagagcggaaggcggccatagttcacagagcccaaattccaaaacgatctccaggcccctgaggactcagatgcttctcatgactctctctctctgtccctctctccctccagccatctctctcacacacacaccaggcatacgtaaatacatacacacagagtacacacaatcctcatccaagtttggccccggggaagtgcttaaacttccaattccaagcacgtctacatgtcgtcacttcctggtgcggtgggagacaacagcctgattctggagttctgtgacccacccctgcctcaccaagagccaggtgtgcaccagaagccaggtgggtttgtctctccctgagcctgtttctctacccccaccaaaccatgtttctaggtgtcctgctttttgtccatgagcccgataaacaccatggcttttgtacctgcttttcaactgagagaggaacccctgctatcctccacccccacctgccactgagaagtccccttgttggtcactccctgctcctgcctggataggcttttctgttgaaaccgcaagcacagggcctgttctgcttcgctggttaggaggcttggtggtggagagttaattgatgtcattcattcagtcagtattgttgtgtactgatcatgtggtgggcccagctctgtgctctgtggggacagccataaataggcacatccctgccacatagcacttgtgttctagttggagcagcagacagtacacaaacagaccaggaggcaccgtgtccggtggcagcaagtgccatcaggaggagagcccgggaggggagggtgggaacagggcaggtacaactcctctgatcaggatcatttaagcagagccctgactccatagaacacagaggtggcatgtgggccacaaggaagcagctaatgccacttcttccctcagaccctccagaaggctctgctgcctgtgagcccctcctctgaaagacacgcctccacacacactcagcccgtgcagctttggtgcttttgacttagtttcataattattttgaaagaatttcatgcaagaagcccatcagatgcaattaaaacatgtcaaatatgttctcaaggcaaaccctcccatttttaaccttgtccagcttgtgaaagtataaccagtgctacatgtgattgtaactccccttgaaaccaccgttgctatttctcaaaacgggaggggaaaagcaagccagtgggctcagaacatgaatttagaatttcaggaatccaaattttggaaaaggtgaaatattttacctccatggcagttggcctcccaggaattcccagggaggacactgtatctgtttaagaaaaaaaaaaaaatgacaaagtaacccattttgaaggctctactcaacagatgtgtagagtatagaaatctatgtattattaaataattctttttaatatgctcaagaataagcaatttgtaagcctgtttacgttctcaccatctgggtgcattctgtcacccatctgtttcatgtaattatgtaattatcaatataaggaaagaataggtgatataattaacaagaaaaactgatccacactgaagagtaaaaatgacatgcatctgttgaatagctttttgtttctctccccttcgttgttaactgttttttcacacccttcaggagagctgttttcgccatggtgtgcaatctctctctctctctctctccaccccctccccgccccctcatatgaaggcagagtgtttcatcaggtattatggaagcgacacaactttgaaagaaatgagcaaaggcttcttggagttattcattgattctttacctctgtgagggccctgatagtcacttccagaagatgtaaggtagcagctagaaccctaggaaatatttgaattaattagtgacagatggaaggacagggcagtgtggggccctctcaggatactggacagagaagctgtttgagaaaaattcccatactcggtgcttttgttttgatatccaggctcaggcaatctgtgttgttccataacagtaccaccatcccagtggattgtgttcgtttccacataatcccacttaagttagtcgctggagtagctcctttgtgtaacagagctttgtgtatgtgggcacacagatggaattcaggcaacttcctcaccctgcaaacagaaatggcaggagaatggtcaccccctcctcagtctgaccaggccaggctccaaaattctccctccatgacttggaacgagcaatacgtatgtattcagggaggggcatcgcagtgatctcttagtttctgtgaccccccaccccaagcccttctgttgagtcctaaattcagttctccaaagatgaacactgtccacagggattctccccaacaatggaggaagccatccctgaagatgcatggtcttgacaaaaccttgaatttcaaccccaagtcacacaaagaagactcacagccccctggaccgctgtaaacagcagtcactattagagatgaaggcctaaaatctcaacacttctttccactgatggaaaatttgggagcagggctcccctcctggcctcctcagtattctgcagacatcctgccctctgtcccaacagggatcttgcctgcagagcgctgcacctgcttcctgtttagggcgcagggcaggcagaaggagagtggagagagagaagcatccacagggagcagactcataaaactacaggggctttctaagcaatagctctcaccaaggaattaaaccccactcagacactgacagagaaatctcttattcagtcacttcttaacttttttttcttcaaacagtgccactcacttactctagggctcactctgtttcctcttgcttggtgatcattttgcatgttgagattgtgttgttttggagacgcgtgctcatcttggcatctcgtgacagagcctcttgatggcacagtctccgtccaggcttggcttctggttcacctcccacacgggaagcctcatgtcaaagcagccactggcttctctgccttcattgttccatgtccagcaagcaaataaataattagttcccacgcaggtttctctttgtttctttgagtcaaaaattattctttgataagtcctccataaagccttcctctaatcctccacgaaaccttcctctaatctatctgtattttgaattgttattgctaaggattttgttcttaaaacaacggatacccatagaacaagcatattggagaaatcactggcatgccatggggagagtatttggaaggaataagtagtagggacaaacatggctgggatactcaggggattttgttggttttgactttatgtttccttaaatccaaagttaaaatagtttaattgcaatcatcactgactaatccattaaggattttaaagaaaataataccacgtgactcctaaagacccttttgtttgccatttctagttttgaaaggttttaaccatgatttctttttcaagaaacatttcaattgtattttttagtatttaaccaaagaacatagagtgattcttcctcaagaggaaattattatagaagacctatttatatatatatatatcatattcaactaaaaataaaaataaaaaaacttcatattctgtactgaaccacattaaaaatcattaaggcttagactatatggttttcatttaaccctcaaaagtggcattaatttttcaagtggtaactgttgcttaagatgctattgtgcctgtttgataaatgtttaatgatttggtagtacatgcatggcttaaaatccattatttattgcacctttgcttgcctggcaaaggtgacgattttatagccccagcagtcatgcaaacacatttataccaaaccgatgactgataataaatttccttactgtaaatgtcagtgggtttcatgtgttgctgccattacatcttgtttggaagctgaatgctacacagttatgggaggcgccagatggtgtcattaacacgaacactgggactgtttaccgctgacgtgcgtgtgagaaattaaaagtacgtgacctatctttacactgacgtgtgatgtcagtggtgaacgggtgttaattacagtgcaatatgcttgcctagtcccttccatcccactcagaggggttttagggaattttttgaaaatagtttgtgtttgaatatacacagagtgagcaaaagggagaatttcccgaggactcctgtttggttttgtatttggagtctcagacaccctgcaagtcacagctgtcatcacataggtgtcactctcatgagcagcaacccacatccctgccaggacttctgggcatggggaagccttttgtgctgattaattacagcagtattgttattgctgtttgcttggttgggggttttatttttattttcgtaactacttcagatattttgaatactgttttggaaaagtttccattgagagcatggaattaacatttttttaaactgctgtcaaaatcatcaggaattgattcaaagaatgagaagaaaaacagtggaaattttctataccaattttttttttttcatgggatgggatcttcatttcctaagaattagcggtaaagacttagatctttattttccctgatctgatgtgaagtatctgagtgactgaaattagccttgtgtgttttattaaaatgtttctctaacttgtgttcagcagtggccactcccatttattgtatttcagcttccttcctgttgacgtttctgcttagctctcttttcatttctatttaaaaagaaggtggatttgttttattcctccctccaagtccttcacttgaaccaagaggctattccattgaatctgaccaaattcctttgaactttgtagccttagcatactctgtaggaattttcagaaaggcttattctttcaaaacaatcattgtgcattgcttttacaaaagcccagcgagccttttggtgtacagaattttcaagtcatgtgaaagagaatacaaaccattgtttgcattgagatgaaagagatatgcttaatttcttcagactaagtcagagatacaattggatgtcaacagaaatagtgagcctagctgaaagactaaaattgtgcatggaggcacacattagaaatttaaaatagagtcgcgcatgttagcttgctcacaggacacatgtgtgttgaaaatatccaggagtgaaaataaatatgaaataaatatccaggagtgaaaatggtggcaagatagcaagattgaaaagttgtatctgtggaacagcactcacttggaccaaacttctcagaaaaatgagttttctgccactgctatcgttgttctagcaaatgaaccagaggcctaagccagcagagcaaatagccacttaagttactgggcctgagcaaacagcatattccctgggggaacagaagttctcatcttattctgtgtgcagagatttaccaaataatgttgcctgaagggaggtcgtggtgtggacacaattggccatcagctttccctcccagccttttgtcccaactccttctcctccctttgtgtctccctctgtgtctgcttcttgtattgcctctgcatgaccatgcagccttctcctttcaaaggttgctctcagaacataatctgcaaatccattcatgtagactgacctatgggtcagtgggtgtgtcatccttccaaatccttgccctggcttttccctctcatccagaaacttgttccctcttgttcacctggaaatatcccattgattctgctaaatttagctccactgtcactttctccaagctgccttatgtgacttttcctgctgtcctagaacagttaaacttcagctgattccatggcttcccagctgatatggtttggctgtgtccccacccaaatctcaacttgaattatgtctcccagaattcccacatcttgtgggagggacccagggagaggtaattgaatcatggggactggtctttcctgtgctattctcgtggtaatgaataagtctcacgagatctcatgagcttatcaggggtttctacttttgcttcttcctcattttgtcttgccaccaccatgtaagaagtgcctttcaccctccaccatgattgtgagaccttccccagccacgtggaactgtaagtccaattaaacctctttcttttataagttacccagtctcgggtatgtctttatcagcagcatgaaaacagattaatacaccagctgagtccagaaaaacttcctaggtgagcacagcctaaactactgacctacagaaccatgagccaaatgaatacgtactcttttaacccactgtattttggcttggtttgttacacaacagtagcttcctgatacactaccattgtcacatgtactgcattttatttgtttacttgtctgtcccccaacctaatgagaattccttaaagacaagaaccatgcctcattcacacctcagcatttagaccaattgttggcatctggtagatccttgatatgtatctgtcaaattgaaattgttgaattaagctctgctaaagttttggtggtagaatttcagacatcaggatactgaataggttatctcaatgccctcagaattgcttcacacattcagttgccttccccactaacaagttagactgtccttgttgctagtgttaaagatagtgggccccagatggagtcacttgtgctaaagttccactttaccaatctgaaactaggttatttgcttgaaatatctgaccttctgagaaaccaggagagaggtgatattcaaatcccattaagccaacaagattttgcttacatctctctaaggaaagtaatatcgaaatgaccaatccactacttgttcattgttcctgtattccttcacttttttactgccgataaaacttacccactctgtctagctcatcagagctcctttctgttttgtaggttggatgctgcccagttcatgaattgctaataaaagtcaatcagatctgtgaaactcaatttgttgaaattttgttctttgactctagaatattgattttatcccaaaattttttttccagagttgcttttctagttggagaaatgactctttggcatagtaactctttgctgtatagtttaagttgtttctataggaataagggcagattccagcctacttccaggatagtaagtacaaaatattttaaagtctatggctaaatagcaactgttaatgcatctctgatatatcatatgtcccaccatttatgatatggattggaaagagaaaaatgacctgaaattctctttcctttaagcaaatagtacttagatgatgccccatacattctccaaaaaccttccccttactgtttttaggatgggaaaacaaccaacaatataaatttttttcatttcacaaaaatctgagaataaatttaccacagattagttcatatatttctttgatttcttaactcattattaagacattcataatcaaaatgtgtattataaacttatatatgctatgatattgtgataaaataaatatacatttggtctctgtccccagctcctggtcagagctcctgaaacacttgtaccttcctaaatgataaaagcaacagaaacatcttttgttaccatattttgttttcattccccacccctgacaaaactctggtgcaataaaggtgagaggagcatcttttgttattgattacaagctccttacaacaacacctgagtctgtatattgacaaaatgatttttggaaagtctctaaggaagggggctggttgccaggagaaccaaccatgtcattagagggttggaactttcaggcctaccccccagcctccgcggagaggagaggagccagaagttgagttcaaccaccagtggccaatgatttcatcaaccatgcctacacgatgaagcctccataaaaccctaaccaaagcggttaggagaacttctgggtggtaaacactggaggtgctgggagggtggcatgtctggaaagcacatggaagctctgtgcttttccccctgccatgccctgtgcagctggctatttctgagccccacccttttataatggccagtaatacagttagcaaactgtttctccaagttctgtgagccatcctagcaaattatcgaacctaagcaggggtcatgggaacctccagttgatagccagccggtcagaagtacaggtggcaacatggacttgcgattggcatgtgaagtgggggtacagggagcagccttgtgggactaagcctaggtagacagtgtcagaatggaattgaatcataggacagacaccctgctggtgtcagagaattggtcagtgtgggaaaaaaactcacacatttggcatcacaagtgttctgagagaatgtaaaagaagtaagggtttgtttggttttccttttaatgtagtttaatacatggaagacaatttttgttctctaagaactatccatcatttcagaagggtactgtttaataggaagaatgccttccatcacttttgaatgtgtttcccgaacctttcagctcatgtcctcattttattccagtacaagtagttctttcatggggatatagagcttgagaatgattaggtagctggatgttaagtagtttgttaaagacatatatctgtaaggtagtactaattattacttgtagaacaatgcaagtcaggtaattggttctgtacatcatttttctgccatggatttactttattcctgcctttccttgtgtgttcacccccagagaagtcatttctccagtttgtggctgaccctgtattgagaatgatacctggagtgccagctagctgacacatgtcagataggattcgagtagaatgttgcagaaacccggaggccatttctgaacactttacactactcaaggtggcaaaggagagacatggagccatttgaggttatcttggttcatgtgctaatgtgccttatattaagaattaatgaatttcagtgtctcagagaagccaacagtggatctcccttgccgatgtttgtgtattgcataaaggcaatcatattttaatgatcatatgagctacttgtttgggggctattatttaattggaaacaagtgaattaaccacctaattcatcaaatctaagttgctatcaattataagatgtacctttattttatgtactattaagaaaaaaaatgcagccaattaaattgtaacacaacgtctaaatgagagtcctgaacagcatgtgaatcagtcatataagtcttagtgctttgaaatttctttcatctattcagagaggggaggcaatttacgtgcccttcaattgcattatttgctgggtgatgtggaaaaatttttttgcatgtgtctcagtaacaaaatgtaacacagcttcatctccttgtcatcttttatttgctcctgaaaggcactcaatcgttgcattgcaagaaaacatggaattacatccattcctccaatgactaatatttgcttcactaatatcaaatttgcaccttgctgctcagtttctgggcctttatgggaacacaacaataagcattcatttcaatgccaaatcatgctgtaatctttttgaagacattgtcagaagcacttaaactcaacacatattgtgcgtataatgcacatgactctcttgaagtgatgacaatgaacagccatggccaagcacccatgcacaggtaaggacaactatgccactgctactgcctggctgactgctactgttgaaatgctgttgactgtaaggctgatttcaggaataccagcttaaaaaaatgtgcacactagaattgatgaaatccggtaaaatccctcaacttagcttccaaatcatttttctaatataaatgtttaagaatggccacaagtgaatgtcatagggtggcaataattttagcttttaaaaacatgcaaaataatgataatgcccaaatagggaatatgggtatatgagggattgagacagatggagttgaaaagagaaatataagaaaaatggaagtgaaagaaatttactcattgaatcatagaggctaccatggcccactctttgacccctgctacatgattttgagtatgctctatccagtgttaagaaaaaagccagtgtcctagaatcaccgttaccctcagtggataccacagacacaacagtttacactttttccgaagtgctggagctaccaaattgttctgagcttcccagtacccccaaccgagaggaaagttaagtgaatccttcataaagcaagtctcaaaaccacagcatgacctcaacagacttatgctctgcgggacagaggtgttggtattcatatcatacttttgaaactttttaattattttagtagaaaggctttttgaattgcattttatgcctgtggaagagattccaactgattggttctatttaaaatgtctatacccccctaccctttatttatttgtaatattgcaatactttgcctcaaagaggtcaacttgaactttgagccgcaccactgtaaatctgtcataatttgttttgctcaaattgggaaaacgagagtttctcaaggagaaaagagagatagagaagcatcagaaaaattacatttataaagcaaaagtaggcttattacggatttcagaaattttattcctaatgggtttgaatctttccatctttcatttccttgtatggacagagctccctttgaagtgtttggaagctttctgtaagaaaagatatatatacacatgggtgtgagctgaaaattgagctcattgttttgcccttttcaaacgtgtttttcaaagatttgcctttcatattgcagatgggagagaggatctgcaattttaccttgtgtaacatctttgcctgaaaagctcaaagtatttgcagacatttttaaaagactggttcccatgtttgcctgctgaggaaagcagaggttcatgtaatttactaccattttatacccgaggaaactgatatttaggaaaaagaggctcagaatttcaaccagtggcaaaattaagaaaacaagcctaaaccttgccaccaagctaatgacacccaggctaatgatcccaaaggttgaatgtaacctccaaaagaaatgctataataagaaaaaattcaccatagatagacagcatcatgatccattttagtatgaaccttgtatgtattatgtaggatcatttgtatttatttttattgctctctagtgtatcagcctatttattgttttagtaactcccgattttgaatctaacattgaaattgagtttcagtaatgcttttgtagtcattctaattcattctaagtgcagaagagaaaccaaaccacatgcggaaacacggaacttgggtctatgtatatccaatgaaattatattttgaccaatttttttctatacacacagaacagttaacaaatgtgcctaaaactcaaaactgtgtatttcagttctcttgacaaatgtatctgaatcatgacataaactcaactgagtgtgcacatcaacatcatctttactaaaaagatcaaatttaatcctaagtagttataattacatccagattattcatttggccatttaagcaaatggaaatgaaccaactaaaataatttgcaatacagaaattatgtcaacaccctttaaaaagggtccatgaaacacaaagttgatgtatctattcttttaccacttaccaagtgccccaaaatgcatggcagaaattgttcagctaaaatacagcaaatgctcaaaacgcaaagacatagttcctgacctctaggagttaatagtctagttgtagggtggcaggcaaccaaataaatggataaaagcaaccacaaactcctccagtagtgactcagctactcacatgtacagtcttatttcagaagctcatagggaattataggtaaagaggttaaaacattaacatttgctcatttctcttccctattttctcatctcagccggtctcccctcccatctgacctccgaatcttccacattcctccccgccccgcaacccccaagctcaactctagaatttcctaacaggagtatcaaatactatcattccttcctttcctacctaagcaatggaatctatggtttgtattttaaagtcattatgagagttgacatcaactttaaggaatttttttttagccttaaaaggttagcttatacaccatgctgtatggtttgttttatcttgctgggttactgttgatctctacacttaaaatcatccctttgtcaagaatcacttgaaaccgggaggcggaggttgcagtagctgagatcgcgccattgcactccagcctgggcaacaagagtaaaactccatctcgaaaaacaaataataataataatctctttgtctaaaatgctaacctaatgccattagaaaaatagaaatgtcttgaaaggatgtggaggtaagaattggatttcccatccatattattcttggtatggtaggtaggtaaatagcttacaattcgccctgtttaatctttgaaataattttccattatgaggatcatttaattctgtctataaaatgtgagtcaagaactagggcttttatttttactttctatgaaggaaataagacccaaaacagaatctccaatgcatgggacattttttggcagatgttcagagggagaaaaggaaaagctggcttgactcataggatcttgcatgtctgtttttctttcccatgaaaacttgtagtttgaaggaacataaaggaagaaaatattctgctttcattaaaaaataacctgtgcttcctgcttctgtgcaaaataaacccttcataaagcagcagaagccatcttcatttacagttgtcactgaaggatgtttccaggctgggaagaatttttttcaaggcatttaaaaaccgtctgtactaataaaagaaaaacacgattttttcaggtcagaagacttcatcatacctggcgatggatatgtttttaattaaaacctgggcacaaaattgggttgactgtgaatcattgtgatgcctgatcactctcctgagacacccaccatcattggtactggttgcctgctcttgacaccggaggccactttgtgtacttagcagttagaaaggtgatgtgtgaggcccggcagctgttggtgttacagctattgtgtgggaaacaaaagccattctgttctgttccccagcctgcctttgtatcacggatagaggagctgtttcataaatgaggtataattctttactggagaatttcattactgcccatgtttcaatgttagcttacacttccaacagcagaggggaatgtctgaacatatctccttttgaaaagaatcttggcttctgacctctgtcaagatgcttgcattttaaatctgttaactagacctgcgattagatgccatcattacaacacatatgcttcccaccttccttgctctagaccacccaacctaaggctggctagagtgtatttgctgtcagcctgcctgtcttggaaattaagcagagtacagtacacactggcacccaggtgaaccagtaggaactagatttctcgcacaattcctcatggatctgtgctaggaaattctcatagagcaaatcagaactgacgtttatttgaagaacatgcactttttcacccaaatggtatatttattattttcatttagaaactatatcaatctaggaagttttcagtagcatataaaaaacaaactggcctaaacaatcaaggaagtgcagtgggctgtgtggttcttcccagccttcatccctccctgggctgtgtcatttgctgtgtgattttgaggttcctccttctaaaggtgagtatatttccctaactcatggatgttaggctcagctacatgacttgctttggccagattttaaaagtattcctattttcacttacctttcacttttctgccattgccgtgagaagaacatgctctggctctcttgcatcaaataagagaaatgtgaggcaggtttggaatctgcaaattggagccagacccacctgagtccaacctagatcagcctacttccagctgacctagaattgcatgagccagaataagtgacagttgttttaagccaatgcattttgaagtggtttcacagccctattgtggcaatatctgactgatatgtattgcttatataactgaagagtccaaaggtagtatgggtttcgggtagggtttgaaaagaattcctgttctatttctgtgtgattctcttggggcttcaacctgggatggtttccctcttggcatgatgaccatagccatttcaggtttcacgtttacaccacgtgccatctagaaaacaagaaggcttctcttcttcaactatcatgcaaaagtcctgggcttcactctgatgaggtcaacttaggtcacatgtgtatcctgacccagtcactgaggaaagagagtgggagtatgccacgtggtttacgtgaatcagagtccctcttgaaaatgggagtgagtccaatctcttccgaaatctgtgttgtgccaaattaaaggtgggagttgtagggtggaacagatgttgagaggtacaagcaatgttaattatggagtctgaatctcccacttttgttttaaatttctatcaatatattgtttggctcaagccattttccttcctccatgttgctaggctatctagagacagagaaatgggatttaagctctagatctgagatgttacctttaaatggcaaagcgcatggccacacccatacccctacagtactggaaagtgggtgggaacccaaataagactttaccattattctgtcagacttccaactcctggtatcccagggttttaagaaaatccaaagcaggtttgacctatcagaatgcggagatttctgatgtagaggatgaagttaatgctgatgtaattaacagcatgggatgaggtgataagaatatctttccactgacttctggtcaccattgtttccaatgagaagtcagctgtaatctttgtcactgtccagacacatagtaagcaccaaaaaatgtgtgttgaatcaatggattaaaaatagaaccaagatcttttggcacatatcccaatgttcttccaagactactctatcacttctttgtaaaactttactttgcacatttaatgtaccccttgcagcttctgcagggaagtaaatgaaatcaatgactaattcaggtaatttttgtaaacatggacattaacatgatcaccagttactttctgtgcttctgagaggcctcctgactctgaagtatctgaaaggttgaacaaccctaataattgaatgcatttttgccatttaataaatgtttgccattttacaaatattattgagcatctactgtccacaagacaccgcgttaagtaacgtgagggacagagaattgaacatgagctaaaacttgtcttcaagtacccaactaatataatttgtcactcaaggtttcagggaaactgtggacagaagaaaagacttgggacctttcatggaactacagattctcagggagtagcttgcctgtctccttgtagtgttacttactagttgtctctaatcattaaggatctcagttctgtatgaaacatctgtcagcattaagacaacatcttgaaaaccagcattttgatgtgacctagctgggatgtcaggcatatccacatgttcttacattaatttcttaaaaacatcttcccatgcattttatggtggctgtacatgggcactattaggtttgttttggtggtaatgtcctggttagataattctacatagttgcaaatttgagggtatgaacactgctacgttttctttgactccttctttgtcttcgtattttttttccagatgagttatgctttaaaccatacaaacagaaaactaacattggaacctaaaattactgtcaatgccaagatcattgtggttggtgcatccagtgttggaatttccttcctagagacattggtattttggtgagttgtttcactctattgattgattggtttttaaataataaaaattatcttcctacatctgaagagaacaccatcagagaacagacctgagattgtttggtactccacacaccctgcctatgtggatggatgaatcagtagaagaatattctagatcaggggttagcaaactatagccctgaggccaggcctggcttgccaactgcttttgtaaataaagctttattggaacacagccacactcatttatgtgttgtctgtggccatttttgtgctacaatagcagattagatggcagactcctctgctgagtagttggaacagagaccatatggccttcagtgcctaaaatatgtacagtctcacccttcccagaaacagcctactgaccccttttctaaaggaatgttttccttactggcccgatcacaaaaaccacctgcagcatttgttaaagatgtagattccaagatcctgcacccaacttacagaatctggactcctggggaatggtctaggaatctgtatgtcaatagacactccacataatcaggcaggtttggcaatgagttttgacttcatacattacaaatacactttcagaaatggcatgtgggccaggacctttcttccagcccttgaattttggatcccctggaacaggtaaaacccttcagggaatatggaggcctgtgcatctcttctgatgctgttttctcatccccctcaaagcactaaacaaggtttcctttcagagcccatttttctgatgggtgatgctcagggatttccagcatccccagtctctctctccatgtgctcacttgagcacctctttaatagaaaacaccctggattagggtctgagagctcgggatcatggcctggcatcatcagcacctaacatggagccctcagtgtattgtctagcttctctcaaactcgctatcttcatttattttttaaaaagtttcatagatgttttaaaaccctgactttgggaaccacagaaccctgaattaagagtccagtttttccaaatcttttgctcaggatcacatgaaaaactttagctaccattcaaaactacaggtgctgagaggtaagcaggagatgggaaaatgcagcctaccatcactcttctggaagccagcagagttcttagctcaggacaggtggggccttgtgaagggctgggtaagcaaatggatggaggaaatgaccctcaaaaggtgtatgtgcctggttaacgtggagacgagctaatcccaagtggttattttgctcatttaacatcacattaaccagataaaaaaagaattgattttttcactttctagccagtttgttcagttctccagaacatactcttaggtaactagaaataaattatgagtcattactgaagttagtaacagagttcatgtgctttgaataatgtggtcagtctgcagcaatatttcactgcaagcatgaaatgatgagaagcacctaggaatattccattcccagggtatgccacgttatagtctgagtgctttacttgttctgatgggtctcttcctcgaaaacttttgaacagcaagttttatgcaaccattttcgaatgatgaattattaaggtggagctgtgaaattatagcagttaagaagttataaacaggtcttaaatcttaattcagctatatacttagtcataatgttttatttaaatgattacattgagacatatacaagtaattttctttttgtggagtcaacttagatctaataaagacaagtataaattttgatgtaagtattgggtcgattaaatttcccaatcaaacagagctttttaaagcattctaaaatactcataattctctatcatcattacacagattacgtacactaaaaatagactggtatcagtttacagatctctaatccttaagagaggaaatagttttctcattattttctctaattattttaagtcagcaatcaccatggtaacctactgcgtattttactttcccagtttaactgccatttgaacttaattttatacatgatttgagctgaaatgaagaaatacagttttcacccaacactgaccaccaatgaggattgaatctacattttggaagcaaaatttaggagaatcagcctccttgtagtcttttttggtttgtttttgtttttgttttgagacagagtctcactctgttgcccaggctggagtgtatggagcaatctcggttcactacaacctccgcctccccccaggttcaagcgattctcttgcctcagcctcccaagtagctggtactacaggtgcaagccaccatgcccgactcatttttgtattttcagtagagattgggtttcaccatgttggccgggctggtctcgaactcctggcctcaagtgacctgcccgccttggcctcccaaagtgctaggattacgggcaggggccacagcgccctgctgcctccttgtagtcttgagctgcattgtcagactcagcaggggcatcatcattcctggaaaatccactcgaggctcaggacagtaacctctttctccagaaaatctggtaattctgtcatctgacaacaaaacaaacacaactttgttcttgtattatttccatgcaagaaattataaaacacatttggtctcctcttcaaaggacaccaaaagcagtttgtgtaaattcctatcctttcttccccaagtgctgaggtgctactgggagagctgaagtgctttgcccaaactcactccctgatattccctaggatgtaagctccatgtgatgaggcaatactgtggtggtgttctgactttttatttttttaagtatgctattttatctgctagctgtgtgcagttaatctgcacagacacatctccttgtctgtggttgtcaggcctgagtcctgcgtcttgtccttcctaggaggagcctgttgggccctccagcaccgggagacatgcatggcaggcattttcctggggtgtcccaggatcccagtcttttacttcccctgctgtcctccgtgccctcctgctcctggccctggtgatccccagcagagccgaggagccagtggccctgctctcagaggcttctacagtctccctcagccctgcgggagacctccaggggtggagatgggcaggggcgtagcgtcatccagggtggggtgggctcagctaattggttccctccccccttgtctggtgcacttggcctctgaggggagcccaggaggaaaggacccagccttctttcctgtcacctgcccagccagcgcaggagcatgcgtgtttgtggcaaggatcaggagctgggcagggcaaggctagggctgtggggtggtgctcttgcattgcagggcattgaggaagaaaacaccagcttgtactatggggtagagggccgtgaattggaggggaaagaacagatcttaagactgtgtgttcttcataatgcccaagacatttaagtgatagatttggattatttttaaatgactgttcttgtgattggtgggttgtgttcatttggccaccccgttctttgggactgaaagttcctggctcggacactatgatgtcacatgtgcattttccttctcggtgcttccattaataagactatttaaaacctccaaccactggagaaagcagaaagagcttggcctcagccgttagcccacctctgctgccaagcagtgttgcagccctgagggaggaactgtcctcatctgtgctgaaggagagtcccagcaggggcccccaggtcctgccagcctgaaggcgccaccacggtagaaactccacaaaccctctcagggtgagatctgtaaagtgaactcactataaagtgaactcccaccaagtctagcattgctgaactcctcaactgcagtgctttgactctttcaggtttccacaaagatattccagaatcctttttttttaattatataaatgctatagcaaaatagaaaaaaaaaagaagaagaagaagaagagaaggagccggaaccaggtgtatgcacctctcttctgtttctgcatcctttcactcctggtgtggcgcgtggaccagcagcattgatatcacctgtgagttcgttagaaatgcacaacctcaggccctgccccagtgtcccaaacaggtttttttccagaattatgcagaacagcatcttgactgtctcctgggcctgcgttcatagagctgaggcagttgctgtccccttctgtttcagcacgagtctctatgcttcagtgttttatagtatttactcctaattatgggaaagttcctttttaatccattatttttaactctttcctaatttaatcccgacgtaaagaatcttttgaagagcctgtaatggcactagaaaaatgcttactggagtcatggatgacagtgactgaaagcagcccagctggtgtccccgcgaccctccgtgtgactagagagaaacactgattcataggaagcaccggtgggcactggaaagcccgggttccccttgtcttccacttccaccactcagaagagttttctcgaaaactgaccaaatcatccagcaaaagatgcagcctcagactttcagcctagacactgatcccctcatctggttgaatgtgtcgaggtaactaagaatagcttggaccaagcagggcatgtttctaaagctgcaattgtggcaatgaccacaactcctgttatcgggccgtgcagttccgcacaatatccggcacagctgtgggctctggcagcagccagcctagcgctggcggcttaattaggctttttatctttacatttgtctgaggacatctgaaaccttcagtgtggcctgtcactaattaggtgactaattaaatagtcagtgcttccttgctgatctcagagctcaaccgcaatggacaggtttgtgattgtgactccccgtcctgtcggtctctgcacgtgtgcgcctcgcaattgccctgttcattgcgctgtgcaaaaacggcatgggagcgaggcccagggcatgtgcagggccgtcctccgatgtgcccaagcagcaggcagcacggacatccacaggggggcatatgggagatggacatccacagggcatacgggacatcagttctggtgcagaggctggtctggtggccagagcagaggggacggtggaaggagctttacctgccaggctcagagtctcagtctccccaggcagcaagagttgacattctgccaccagagaataaggatccagaactcaccctggtgtcactaatcacaatggggtttcctattcgactccaatatttaaatgtaattaatgttaaataaaagcaccttcatttactgaaattattcacccctgctcgtttcagtataacttatctcctcatacccacattagagactcccagaacaaaagcaaagcaatccactttgagcaacattaggccttttcgacgggggaagatcagcttattgtcctttttttgtgggtgctttgtgattctttggcattaaaggtaagtaggaaatgcatttttcatgatcacacaaagcacaaaccatgtacccggatctgagtcgtacacccgcctcctcagtcttcatcatttgttattggatgattttcaaataatgacattggtacctgtcttggtttgcattctttcaaaccaagctgaaaacaaagcatttggatacaagtagtttatttgggagtgatcctagggaactgcctgagagcagggccgtgtgacagggaagtgaggatagccacaaagccaaaagacacccttgtcagtgggtccccactgtggacatctgaggtcagagaatggccgtgggcagagagaggcagacaggagaccccttgcaggtgagcaggtgggtcagggtgaggtgagtaggccccagcactatctctggagtgcccttatggtcccttagtttgcttagtttgttctgttcttccttgttaatattcttgaagttgccttttactgaaactttggcatagacgatgatggagaagaagcaagggttaggtaagaaggctgtggggagaggattttgtgggtttcttgcagttctgaagaggacacaggtgtactatcagaaagttttgctggaaaagagatggcatttaaggaccttgtcttagcaaatactttatttctactttgggatggagataaggttagaatcagtagttttcgaaacatagtctgtggcccagcaccatcagcattacctgggaagctgtcagaggtggggatacttaggccccactctccagggactgaatctgaaacctgggggtagggccaggctctgctttcccagccctccagggaaggcggcaggtcaaggaagtcagaagcgacggtggagtggagagggcccaggagagtgattccaaaacgcagaacttcagtctcctcacctgtgctgcagggaaggcacccagaatccctcctcacacaccagcctgagcatacagtcaggtagcaaatgtcaagcatctgtccaaaggcctagtgctgacacttgttagacggacacctccccactaattaaatttgcatgtctagatccccatggaagcctgcattgactttcaaaggcgggaagtggctggggagctggagtctcctccacgtggaggatgccctcttccccgaggactgggggagccggaggtgcttcccacccgcagctgcatctgactcctggtgagacgttccctggagtctgcagaacatcctcctaagagactcatgtctctcagatatttaatgggatcataaacttccttcatagaaacttacattaaactctcccctcctttcttgagactcccaaactctcaggagcctctcagttttctctcctccttgaacagaggctctcaaagtgccgtccctggcccagcagtatggacatcacttgggaactgttagaaatgcagattttcaggccccacccagacctcctgcatcagaaacactctgggaatcaggcccagcaatgtgtgtcttcacgagacctgcagggacacactcggccaatgccaccaggccgatgtggtgtttacccttcctgcaccatcctcccatccccacttttctcatgggcagcctcactcccaaaaaagcaaaggcatcatacaccctcagctgtgcaccctttcccacttcctcagctctgcacctgccagccactttatttcctccctgcggagggaggattagggccataattcttttatcttggcgcacataaaatgatgcacaagaggattgagggaataaggacatatcaaactgccccccaacttacagcatttgatgttgggtggaaatttggaagggaagcccagaaacagccccgcctgaaaacacaggcatgagggccctccagtagaggtgacaggtggtcctcgttgctggggagtgggaagaccgtgagcctctgtgtgagacccagagcaggcaaagccatctatgcagcagatggcttctggagaccaggtttctctctaagtgtacttctctgaagataatgcctttcaaacagataatccaacacttaccagtatagtaagacataggcttgaaaaaaatggtttgaattctcctttttattttaagaacttgtggtggaggaaaatgttgtgaatcaccttttgagattttagggttaatattaagtaactgtttctataagcaacagattgcaaaagttccaggctctacaattctgcacatcacagccacttggatagggatggggagggttgtacaaatacagtgtcctgggaccctgttcctggagttacaattcagtaggcctggggtgggtttcaggaatatgtacagtatttttaatagaatccccaggtaattccaacatgcaggtgggtttaggagccatttttatagacatttgctcaaaattggcagtctcatctataaggaaacctatttccccctgtaattgctcattgtaactaactcatttttatgggcttgttttccaaaccacattttctaattcttagtgaatcatataacttctaagtcacatcattactttggggcttaccaggcctaatttttaagttattattaacattatatagctgaacccatattcatagtattaacatgctaaattggacctagcagaaagcatttcacgaagtctcatgcttaaactatcaccattaagaaggaaggcccaagaaaaaacctgcccatgtggtgttattaaagccttgctaatagccagcatttgcccaaaacacaaagctcttcttcatcctccccaaccagaagtgatcccactggattttgaattcccataatgttccatgattccatccttaaggaacaaattgatttgtgtcttgtattttgccatctctcatgtgcaagggctttctggcttgtctttgatagctaccatcttggtatttacatctggtatgtgctcagtatatataaacatatgcttaaagtataaatgtataatgtttttacttcctagacatagataaaaacatcattaatcatttcccctaaattataaaggaaagctcaatttcattttcatctgttttgccagaactcccaaattttattcttatcttttcaattgacatttcaagaatggcatgcattttcattttttcagtaaggatttatgtgtttattttgtgatacataagttttttatctgagatcctgaacttctacctagccccttatcctggccaccatgcccctcccctgccaggtccccgaggactccagagagcacccagggccctccaggcagacacttctaccttagtgtcgggtccagggttgagtcacacccagactcagggtaccttacgagacttgctccttgccccgtttctccaggtcgcatcctcattcctacaggagctccaggaccagggagctctgagccacccaaggtggagctgggcaagatggcacccaagagaagagagaagtagggtcagggagagagcttgtaacctctgtctcaccccacgaactgcccactcccttctagatgtgttcagaatcctccatcccacacctcctctgtggatctctctcttcggtctccccctggaggtcagagtgtgtcatgaccaacaactttgtggccatggatgcagctgccgtttaatttttactaacaacaaaaatggattgagtactattaacacactcgaacaaataccccataactccttaatatcatctaataccagtccgtgctcagttttcccagtggtcttaaaattgttcttttacagttagttggtttggataaggatgcaaaccaggtccaactactgcatttggttaatgtgcccctgaaatctctttaatacttaacagtttcctgcaccttccccgttttctgaaattcattttcttgttaggttcttgcatgttagagaatttaagatgaaataatacaatgtgtggtgtttactccaaccactacagtgttggtgagtattttcaaagcagcacaatattagtcattgctaagcttttttcacctcgtgtatatttaaaatcctccaaaataaaaatttttttaaaataaacaaattaaattaatggctcaggaccttgtccaaaagtctcttatgatttaaacagaaaaaaatattgctaaagaaagttaaatttttttcagggaaaaactggtagattctcttactctgctgtgtacttaacaataaatattttgtgtggatttgttttgcctctgatattggaagttcacagagctcccaacttctaaactccacctatagtattttatggcatgtgttgttgttaagactgaattaaatctgagttattttttaactagtagaatatgtagataggttaaatatctatcacgagctaggatttattttcattggcaaatatttttgtcactgttttgaaccattcagaaagcagaggttttagtaaattaaattgaaacatttagatcgatgtgggataataattttttctctacattatctatttgttcaaataacagcattaattaaagcagttaattaaatcacttgctttggttgcgtttgctatgcctgcaccctgcagacacgcacagcacacacaaaatcagctagaaaataactagcgatcgcctagcaggccgacatgtatctactgcccagaagggtaagcaccatgaaaagttttatgtttcttttatcatgttcacaataaatgggcaatgtgaccctctttatttgaaggataaggatgtttagacctaattttgtagctgtcctcctgaagcatggaatgaaacacaataccttttacttatttccctggataccctaatccctccctgctttacaagtatctttgagctgttcctccctttgtatccacagcaacgtgaaatccccactggaattatttgctgtgaaaatgcaggtgcccttgtttaatgtttcattggcttgagcacttaacttgaaactttttttttttttcatgatatggtgacctttgattttggagctgagggctcacggtgatgttagatattgtttatatacattaagccaacaccattagatctgagctttatctgtggttctgctgttcctgccatttcatcaaatgcatgcccaaatgcaagctgtactccgtgacccactgttctatttgaaggaactttttgaatattcataggcaatcaaattaaaaatcagtctattagacttatgtattataaacttcatgactttagaccaatactcttacatagttatagatttaagaaattaaatatttagacactgctaaatcggattatagagagaaccatcacagcaaaaatatgaggttggagaaagaaatgaaaatgctggtgatattttcatataaagtcatgaaagggcagggaaccttctctgaatagcaaggaggttgatgttacaaagaatgtcggggaagtttgcttaggcccagccagaaggacctttatgccacactagggaatttgggctgaacagtttggtaataaaaacacttaccatttattgaaaatgtactatgcagaggcgatattttaagcattttacagacaatgatgcatttaatcttcacagaactcctaagaagcattaggttctagagccacagagaggtcaaataacttgcaaaggtcaaaaagctagaagtgctagagctgggagtggcactgaggcagtccgacttctgagaccgggatcttaatgagtctgatctgcagctaccttggtaaaatctctaccaagaacaaaggtagggattttaaaaccggaaaccgttgagattttatttaatttaaaaagaggtttccagtagctgtgtggaagatgggcagaagagagagactcaagccagagagacaaaccctctagacaagatggtgaactaaggcagtgtgttataggaggggagggttgtgggggcattcaagagatgtggacaaggtcaaagtgattggacatggtggccaaagtgtgtagtgggaaggagcctgagactggctgccaaattcctagctctagaggtggttagttggccaaagctttgatggagatagaggaggagtgggatgaggcgaccaagagctttgtttgggcacatattaaatttgacacccccctggagcatgccagttagggctgataggcatttagaaattagatttagagctcagaagaatcactgtagtatagtacattgtagtaaatgtgcaagaggaagtcctggtggtggataacatcacccagggaaataggcatgcagcttgggaagcttggctagggagaaatggacaaaggaggaggagctggtaaaacagtcatgaaagacagcctcaagacagtgttgtcccagacaggaggttctgtggcaacagctcctgggggaggcctcctgcatggccccagctctcagtgtttcctccacccctgctcctttaggcccaggatcagtgatggcacccactgctgctagaccctgggtactctccttccctctttgtccctgtaaccctgcatacacagctgccttcattcagtaagaccttgtggagtccgccatcttttttttttttgcctggatcctgattaataaggatcttctcatatccccagctcatccttcctccatgagtcaatgaaaatagagacttctaattgcctcccagtattcattctgcacttggtgacaaaaccctggggactgtggttctttgaaacatcactgtgttttctttgaaaaactacattttccagactccctgcttctccctggccatgtcactgagttctggctaggtaagcagaaatgtgggactttcaggaagtctccttaataggcagcactctctgcccatttctccttcctctgcctgtaatgtggctgtgatggctggagctccaggagctaccttgaacctgaggtgaccctgaaaatggaaatcacacatggagaagcagagaagcaggtcatgggcccagctgcctagctgactctgtggatccgtcctatcagcacgaaactggtgatgtccaggtgtcttaagtatagttttaagagaaatttgctctcagagggattgagagagatcaaagaggaacttgaagagaagataggtttaatggggagacatgtctcttctgactcaggggaatggaagaacgctctagacatggtaagaaggaaacataaaaatgcctggtgaccagtccccattttctttatgacataggagatgtgctcacccgagtatgaggaagggggatagtaaggataacaagaggggttacagtagagaacttgaaggttggagaaaggcccagaacagcaacaatgaagaatgtaaaaagatttcaacttgggctaaagaaaaagagtggaaacctgttttttaatgtattaaaattcaaaaaatgcctctatcccccaaaaaatctttgtactatatcattataggttaggttttttaaaaaactactttgttgttttggggaaattttaaattgtacaacagcataatttaggataatgcaatgtggtagtttggtaatttataaatcatctgatccatgttgttcgataattcaaatgattcaaaaccaaatggacagtctttgtagtgaaagatgtagctggataattattaagccttctacttacatagagatgtaaaaaaggcctatatataactattattggtgtaacataaaccacatatctatcatatagcacccaaagctggggtaaattttaactgcttgtgagtataaacacattattattattattattagcatttttcattaaatggtaataaataagagacaagtaatcagtgtgtacttgcagactgtcagccataagtagctgggttaattgtgacctttatgttatttgaagatattaaaattttttattcttattattagaggataagatgtgctcagttttcttcttatcaaataagaatattcattcttaaatgacactcatccttagagactttagagcaaaacctctcataatattgagctatttttaaatgtcaggttcagttgagtttattgcatttctggcctgcgccatcaccaaaagtctcctgcttttagtgctactcaacagattgtcagtaaattgatagcagttccacatttggaacatttccaatcttctcatgggaaaggagggcaggtgtttctctctgacttggtgaaggcttcttttttggcatttggttgattgaaggggaggtgtgaactaagaagagattttagaaaaaaaaatctcatcagcatgaaccctatgaaaagatcagctcacccatgaaattttactgactttaaccagggggtggatttgcagcaagagcatcttaaatcctgatgggcaaacacggagtgagccttgagcatgtgagttcttcagaagtctctacttaggtgcactttacctgtaggactagttagagggagtattgtgggtgcctggagcagggcgctgcctagggccagcaggcctggctttctttcatagctggcactgcttatgagctttgtaaccttgaacaaattacttaccatttccaaccttgattttcttacctatgaaatgtggatcagaaaaaccggtctcttccctatccctagcataaattgtgtagaagattaatctctatgtgaatgcctatgaatgtgccttgggctctggaaagcctgatgcaaatataaagcagttttgctcttaaaaaggaatcctctagaatttcctcgcagatgacactttttggtatcctgatttgagtaactgtgtgtatctgaatgtaataaagctaatgtcagccaatgggaattagatgacctttggatccctctgaacaatttgagatctacaggacagtacaggcagaggtaaggtgagaggatgctggagccaggcatcctgggttcaaaccctgcctccagacttactagctatatggttgtattagtctgttctcacgctgctgataaagacatacctgagactgggccatttacaaaagaaagaggtttaatggacttacagttccacatggctggggaggcctcacaatcatggtggaaggcaaggaggaacaactcatgtcttacatggacggcagcaggcaaagagagagctcgtgcagggaaattcctatttttaaaaccatcagatctcgtgagactaattcactatcacaagaacagcatgggaaagacctgctcccatgattcaattacctcccaacaggtccctcccacaacacatgggaattatgggagctacaagatgagatttgggtggagacacagagccaaaccatatcattctgcccctggcccctcccaaatcttatgccttcacatttcaaaacccatcatgccttctcaacagtcccccaagtctttttttttttcttttttttgagatggagtttcactcttgttgcccaggctggagtgcaatggtgtgatcttgactcactgcaacctccacctccccagttcaagtgattcttctgcctcagcctgccaagtagctgggattacaggcatgtgccaccacacctggctaattttgtatttttagtggagacagggtttcaccatgttggtcaggctggtctcaaactcctgacctcacgtgatccacctgcctcggcctcccaaagtgctgggattacaggtatgagccaccatgcctggccccccaaagtcttaaatcattatagcattaactcaaaagtccacagcctaaagtctcatctgagacagggcaagtcccttctgcctatgaccatgtaaaatcaaaagcaagttagctacctcctagatacagtgggggtacaggcattgggtaaatacagccattccaaattggagaaattggccaaaacaaaggggttacaggctccatgcaagtccgaaatccagtggggcagtcaaatcctaaagcttcaaaatgatctcctttggctccatgtctcatatccaggtcatgctgatgcaagaggtgggttcctatggtcttgggcagctccacccctgtggctttgcagggtacagcctccctcctggctgttttcatgggctggcattgagtgactgtggcttttccagacatacagtgcaagctgctggtagatctaccattctggggtctggaggagggtggccctcttctcacagctccactagaagtgccccagtagggactctgtgtgggcgccctgactccacatttcccttccacactgccctagcagaagttttccatgagagccctgcccctgcggcaaacttctgcctggacatccaggcatatccatacatcctccgacatctaagtggaggttctcaaacctcaattcttgacttctgtgtactcacaggttcaacaccacatggaggctgccaaggtttgaggcttgtatccactgaagccatagcctgagctctacattagcctctttcagccatggctggagtgtctggaatgcagggcaccaagtccctacactgcacccagcatggggaccctgggctcaacccacaaaaccactttttcctcctgggcctccaggcctatgatgggaggggctgctgtctctgacatgccctggagacattttttccattgtcttggggattaacattcggctccttgttacttatgcacatttctgcagctggcttgaacttctcctcagaaaatgggattttcttttctattgcattgtcaagctgcaaattttccaaacttttatgctctgcttcccttataaaactgaatgcctttaacagcacacacatcacctcttgaatgctttgctgcttagaaatttcttctgccagataccctaaattatctctctcaagttcaaagttccacaaatctctagggcaggggcaaaatgccaccaatctctttgctaaaacataacaagtgccacctttactccagttcccaacaagttcctcatttccatctgagaccacctcagcctggactttattgtccatatcgctatcagcattttggccaaagccattcaacaagtctctagggagttccaaactttcccacattttctcatcttcttctgagccctccaaactgttccaacctctgcctgttacccagttccaaagtcgcttctgcatttttgggtatcttttcagcagcgccccactctactggtaccaatttactgtattagtccattctcatgctgctgataaacataagcatacccaagactgggcaatttacaaaagaaagacgtttaatggactttcagttccacgtggctggggaggcctcacaatcatggtggaaggcaaagaggaacaagtcacgtcttatatggatggcagcaggcaaagagagagcttgtgcagggaaactcctatttttaaaaccatcagatctggtgagacttactcactatcatgagaacagcataggaaagacctgttcccatgattcggttacctctcaccaggtccctcccacaacacgtgggaattatgggagctacacgatgagatttgagtggggacacagagccaaactatatcaatggtcttcgcaaattacttgcttcagttccacctaaaaaaaatagggataatagtattactgacctgactggattcctgtaaggactagatggggtaatgagccatgcaaaaggcttgactggaagcagtcatcagggttaagctgcgattgttatgcttccaagcagtttattattaatagaagtagtctaaaatttaaacttcatactaaatttacctccctcccaatttgttttagttttactttgaaaagcacattttaaaaacctgtctcattactaatgtgtagctttttggaagattctatagttagcagctccagcgccatcttccttttttccttgaaatggttggttctatctgaaggttcgtgcaaagaattagtagctccaaaagcaattcaacagttggatgacacgtgatataaagttaaattgaattatgataaacttttgctaaattgcacttaactgcttgttctttttcatttttctttttctttagctctcacatgaagtttaataatcttaccctgatttcaactcatggactcccaggaaaaaaacttctggacactgaacaaaggaaatttttagccagcgagtatgaattgtatttgctttttcattctgaggcctaaatgtcctactctgtgtgcagtctatttaatgctaaatagtagatttcagattggaaaaggagaagtggtggggcttttctactggagttcagacatcacttaggagatacaagtaccagtgtgttcacaagccagtggccaagagtggcaggccagggccaccagtttctatccgtgggaagacatctgccctgttccaaacaattggggtggagcctacggacccagccagccctgcctttgggctctgagtgacactacagggcaatgaaggttggtgactacatttgcatctgacagggcgcctggctgggatatgggtcccacagctaccctggccatttgtactcagcagctgatcaggcaaagaacttccatgccagtctgggtgagctttattgtcttcatcccagtagaatcactatttgacaacatctgttctggaaaataccatgtctttatcacatagctttcattcattttaatttcctgtagcaaaacatggctacaagaaatattagtttctctgcctctagaaacaagctcctaatttttccaataaggaggaaggaaattgttccctcccaggggattcattttagattccatgatgaagggaccctctttcctctgtgaaaaagactcattttgccttcgaacaatgagaaaaaacacaacttccttgccagcagaacgggttcgtttccactttataattttatcagactataaacttttttttgaaggatgtccttatgatacaaaaaagggcatgggtttgagccaggaggatgtggattcagatcctgcccctgccacgaagggcctgggcaaggaatttcatttctctgagctttgctttttttgatcacgagcagtacacgagaagccaagcttgctggattttttgttaaaattaacataacaccaacttctggccaagaacacattctctccatttccctctttctaaattacacgattcccaggaaatgctggttttattggcaaatgtcttaagaggaacttaattccatcagcgtagtgaaagtttccctcaatcccatgttgcgtgtgtttcaggagaaaacagctaccgagggggctttctgcaggtgtgacgctgcgtgggcagactgagtgggtggaagccactggcgtccctgctgctgtccctgcctccacagtctcagcacagcagccagagcaaggctgcggaaagctggctcagatcacatcgcctcctcaccgcccagaactgcactatccaatatggtggccactagccacgtgtatttacatttaaattattaaatgagatgaaaaagtcggctcctcacattagccacatgtagccagtggctaccacattggatagaacagataagaacattttcatcatcgtagaacgtgctgtgatgctccagcctaaactctgtctccatctacttaattctccagcctcaccttttattatttttgccctttttctccccatttgagccacaccagcctcctcgatgttcctcagatgcaacgggcaagtccccaccttgaggtctctgctttttgctcttgaatgttaccttttctatgaggtctatcctgaccacaccattcatttgaagccaacaccccaacacactccagtccctcatactctgctctgtttttttcttgctacttaaatcctcctaaatattgtattatttgccttttgaaataatgtttattcttcatatttatatccagaatccttcaactataatataaacaccacaagggcggaaatttttgcctttttattcattgattcattgatgtatactcaatacctgggtcagtccttggcacatagcagatgcccagtaaataatgtggaacagaggaaagttacctccagaaatacctgcaaaactcctctcaagcaagtgttagggtctaaataacacagccagacccctttgcatgggtaactgcatgtcatcacatttcttagaaaccacatatttcagtaagattgaaccataaataggagatgtctttcaaatggtcctcataaccccaataaaggaaattatctctgatcatggggtttcaaaataacaggtgcaaatgacattcataaatttagtaatttaaatccctgattccaaatactaattttgaacttgtcgttaaccattgttttaatttattattgttagaatttttgaaccatttctgtcttctttcccaccgcccccatccagcctcttgtggaggtgctaatggcatgtctgggatgcagccgaaaggaaggcagtgggagaggagaaggaacaggaggcaggagaaatccactaattggacaatcagcactgattaattgaaagttaattgtgatagtcctttttctaggagtgtcacaattaatcttttatgagaatttctaaggttctttccagctcggaagagtcatgattccacgaggtgcaggtctccactgactcatctgtggcccccagagcttgcttctaactgcacacctggagctttggactaggcttttgaccacaaggttgggggcactataacctagagcaagctgctactcatctatgccctcttccaggaatttccccgtcctccatttttgctttttgtttttctcctccttattatctgtcttcagaactttctatgaagacagtctttcacattagttttgagtcacggtcaagctcacttgaggaacaggaagtttcactgatgtgcctcctttggttccttctctgttttcggatgaagcctagtggaggtatttctctcaccaccaggccatgagtcaggccctgctatgttagaatattaaagcttattcattctacttaaaaaataattttggaaaaatatcacttacagtcttcgatatatagtttcactcaactggtgaggaaattaaggaaggtccagaatggatagtaatatccagaatgggtagcaatcacttatacaatgatattttaaactgagaaatggccaggtaatcccagcactttgggaggccaaggtgagaagattgcttgtgcccaggagttgaagaccagcctgggcaacgtagggagagtcccatttctacaaaaaaaaaaattaaattagccaggtatggtagcttgcacctatggtcccagctgctcgagagtctgagcggggaggatagcttgggcccaggaggtcaaggctacagtgagccatgattgtaccactgtgctctaggctgggtgacagagtgagatcttgtctcaagtaaataaaatcattcaatgtagtaacatattgtaacagcaatcaccccacattcttcaacacttccttttgtgacttagtaaagtttcctaaaaatcagtggtccccagtgccattcccactggacagagcttcacattttaactctcaaatatgcattctgatgtgatcaatgctactgtcctgctgtcattaaaaatatcattgtctttgccttccacaaatttcccctgagagcctttatctttgggcacagcctcataaaatgaatccctgtgcactaactgtatttaacttttcctcatcgtggatggcttagagtagggatctggagcagataaaaaacaatctttcatgggtctctcacaaatgtgggaagccatgacatttcctgtattcctataaagctaatgaaatggtttttacaagagaatttcctctcactatccattattttcctgtgataggccagtccccgattttcttttcttattaagaagaaattttcttgtttttaagttgtttcacagagccctttcacaggtcctgtaacaaggtctaatatgcccccatgactagaattctctttgtgtggtaagaccaggcttatgcgcagatcaaaaggaagaaatgttccctcattaccacttcagaatcttgtttgcctccaaagagagtaaacagggttctgtctcattaatattatttagaataatactcttcacatacgcatcctgcctaacaaagcagcctgtcttacattctcacggtcactccttatagcggtcagcagtggaggaacgtagggagagctcattaccctgtgttaagaggtgaggaaactgaagacagcaggaggatgcagagtccaggcttgtcagcagcacagaccatggcagggttctttttgaagaggactgtgctgccaagcatagaagtggcgcgtgcctccagtcccagctactcaggaggctgaggcaggaggatcacttgagctcaggagtttgagaccagcttgggcaacatagtgagatcctgtttctaaaaataaataataaatagatgaataaataaaaatgttagtgtttttatgttaagagaaaaaaggaagaaaagaatcatacagcctaaattaaaagaagcacttaatgtcctattaccttagactctcagtattcagaacagaatcactaaaaggtggtttacctgaggtcaatcctttcagaaaattctggaaacaaccctcacaaaactgtttaaataaacccaaagccacaagaaacccactcttatcatactacgtgaaagcgctcaaactccaagagagcccagaaaatggaagccagtgcagccacagcacgctgaagccatggcatgaatggccgccctgggcctgctggcggtcgaagtctccgttcctagaaaatcacctctgccctgaagggtgaatcccaaagtctccagggagtgtacttgctgcgaacctaactccctaattgctatattcttgaagtaaaatgggttttgttgttttggcaggaagccatacgctaattctcagaatgagtgattactgaaaagtattagcgaataggaagggttctcggtattcaaagattctgacccctggctttgggaatcctcaacaatgtcactttcttccttctcattcccattgaggctgtggtcaatacaccaatttaacagctaaagtaaatttacaaccactctgaagtagaagcagaagaaaggtatagtatgagtgatttcacacacacacacatacagataaacacacacacacacacacacccctcccaccctcccagttgtgggctgacctaagccaggtggaacaatttagctttaatgggaagatgtcaatttgtaactaagtgtttcataacgaaaaatctcctagtatcagtcctggtaaactcacagcaagagcacggactcagcccactaggggacttgaaccagctcaccagatgtctaattaatgcccgctgtcagctgctcagatgtcacttacggagcttctctctttgcagccactgttttaatgataaagattatgcactgatgtcactgtgctcctgggttaatgtcgtggtgggtagaatgaccggcatagaccgagcagccaagcacgttgtgctttccacggacgagatcgtgccctacgaccacctcatcctctgcaccgggcagcagtaccaggtaaggccgggcacagggggcgcaagccacgtgtctggagagctccatgaaagccattcatatgtttactggggcacacacactctgggtaaagagcatccctctgcctggacagctgctgctctaaattcataaaagcacccttcagggcccgcacacataaccagaattatgtccgcaaaccctcccagaaacccattccaagaaaaacattctgctcgaggataaaaatcacagcaagttggagaaatgtcattctttaagctgttgtccaaaagtctaacacatactgctcgccctagcagaatccagacgcaaccaggcatgcatttgtggtaaattaatttatgcctcaagaggctaacatttggctgtggcaatgggctctcgcaaaagtattgcaaacacgtgcaccttctgtcgacccttattttattttgtctctcagttatgaaaataggaaatctgattgattggtttcccagtgtccatgctttccttttagttaaactctccatccacatttgagtaaagcattgctggataacactgaagctgttcaatgtcttagggcagcagattttaatattccactttgtaatatgcatgagtgtttcatgtagtttacagcagtaaggtatttctccagtgacaagaggcttactctaactcaaggatgaagtcttagaccaagtttgtgaaacccatggcccatgggcccaaggtggctttgaatgtggctcaacacaaatttgtaaactttcttaaaacattatgacttttttttttgcagttttttttcttcagcttatcagctatctttagtgtttgtatattttatgtgtggtccaagatgattcttcttgtttcagtgtggctcagggaagccaaaagattagacaccccacttagaccatcttgtgaatagttgtgggattcgatgcgagcctgtgtatgacagttttccttcacgtcgccaagcgcagaggaggcagcgcatgaaggagacagggtctccacctgggtgttgccacagaatgtgctcagcagctctaagcatcacttaccctatattttctgccttggccgcacattgagatgacctgggtgctttgaaaacacatccatgcctaggctccgcccccagaggttgttttaattattctagggtgggacccagtcatcagtatttttcaggtgccccacatgcttctaagctaaagctgagaaccacaagcttgcactttcttgactaagaattcctcatctataccttagaatagcacctctcaaactgctgtgcacatgaatcccctgagcttcttgttaaaatgcagattaggagcaggaggccatgggatggggagcctgagatgctacattttcttttcttttcttttctttccttttcttccttccttcttttttccttccttccttccgtcctttcttccttccttctttctgtccttccttccttccttctttctttccttccttccttcctgtacttttaattccatttattgttggatgagtctattcctgtgccgtaagtttccatttcttcagtttcttctgggctatctttttcttctgcgcagcctcttctggtttaggaacaatttgttccttttcaataaggctcatctcactgtggcaggcagagctcacacatgggttaacctgaccctgagctctgtgagtctggccacacatcttgggtactttgttcacctggctatgctcaatgaccagagaatctacatgtaaacccttacgttcagcatgactctgcatttttaagcatgtgcagcaaacattcagcactctttttgggccactgaccctgtgtccagtcccactgtttggcctggacgcacctaccaactccacctttgtaacgtcagaatggtacacactgtctctgtcaagtgacatctttcagatactgggtggctcttgatatatgcataccctgacggcctgagcagtttcacaggtgttcttcaatgaacacgaagatttgaacctctcgatttgcctgagttcacatttccacagattgtcaggccacttaggggaacaggaagatgttacatttctaacaagctcccgggtgaggccagtgctgccagtgaatgaacaaccctttcagtagcttggatcaacctctgaagaatctctctcctcccctcccctcccctcccctcccctcccctcctctcctctccattcctctccccttccctcctctcccctttcctcccctccactcccctcccctcctctcccctttcctcccctccactcccctcccctcctctcccctttcctcccctccactcccctcccctcccctcttctatcccctcccctcctctccattcttctcccctcccctcccctcccctcccctcctctcctctcctctcctctcctctcaattctcaaagggtataaaaggatatttttatggttaaaggataaatatttactgcagggatacttcgttttgatatttaagtattcctctgacttgttaaaacattaaacccgacagaaatgccatatgcacccccttagcttgtcttcctgtcacctgcctgccaggttccagctgctgccacgactgcgtactttggaaactgagtggaagacccagccagctgcccagagcctcgggcatctgcccatgtgtgcccagctgcccctgcagctttactctgtggcacattaagctcttgccctttttacaacggaaaaaaaatgaaatgaagaagtgataaagggagttccaatttaatttttccagaaggacataaaatcaaagtacatagagtggtacagaaagggcagctgaattcactggggagcttttctcccccttcccccattgtcttcaactctctcctggttttgtcccaattttgtgattttctaaaaaacaaattaaaataatgaaaacagagcttaaacccaaagcaagaagacaaccctctataaaatgtaatgacaaaccgcaacctctaatcagaccttttaaatggcacgcctcactctaaattgttgtgtaatgtttttaatatccaaatgcacatcgctatttcttattacaaaatccatgcacaaggtaaaatactacattgcactgcacggctaagcatgaggagagctggtctctcccagcccactcttcctcccagctctctttccagaggcaaccagtttgaagcatttctgttcttagtttttcagtggctacctgcataactccaaatacagtaatatgtttatagaatgtccttccttgctctgtcaacttcagacattatctacaacctctccattttcgaagatgaagatttagctggctcactttccagactctataactccttctccagccctccaatcaatgttgatcatttttgttggcaaacacactctggttttgaaaacccctctgagatcacagggccactctccatgactcatggacggtcatggagcagcagagagatgccttccccaggcctggatttgaggaacctcataaagaggaagaacaaaaatgtaccaactgaaatcaaatgagcttggtgttgagcatgagaagactgtggtatggactgttcatgggtcgggggtcactagcagctgacaggtagggcaggtacttccaagcaagcaagaagaagagctgagactgtagtatacagtgagcttgatgtgggtcggcaatgttacattgtctccaaaggggttaatcatgtcttagactgggtcagtaatagtgtggcatccagaatggtgcagcccaggtgacagccttctacacacagcagggaggaaagacccatctacaccagtgctgtacctcccagtaagagacctgagaaagacactcccccgtgtcatttgacagcacctactatatagagatctcactctgagaatgattacaggggaaaataaaagcatgcagtcaaagaaaactggctgttttaaaaatggctgcaaattctttgatgcctcttccatctaagaggtagagtctatgtctcctctccttgaatctgggcagccttgtgactgcctcggccaacaaagtgcaaaggttgtgacatggtgtgacttctgaggccaagtcacagaggccatacagtgcctcctggattgtggcagcagtcgctcctggagtcctgaggtgccacgtgagaagttctgatgccctggggttgccacgctggagacgctgtaggtgagctctctgcctcccaggccccactgatcccagcccttcagccagccttgcaaggcactgggcatgtgagtgaaacaatctcagatcctccagatcagtccatccaccagctgaaagttgccaagtgactcctgtccacagcacacagaataaaagaattgctcatccaaatgctacccaaatttctgaccaacaaaatcatggaaagttaagaaagtaggtatttaagctactaagttttagtgtgagtttgctgaacagcaaaggacaactagaataaaaagataacacagtaagagaaagagaacaatacaatatttggaaaaatcagaggaagaacatagttgtgaaaatgttgaaaaatttaggccacacacacacacacacacacacacacacacacattgtaggcaactatttatcatcctttatacaatttgatcacctggcctctgaaatgggagctgaagccattgaaagagcagaggcaaagctgagaaggccacacataaaaaaggagatgggtgaataagaaaaaattaaaatgaaatctccatcagagacagaactgctgctaaacagttagtgatgctgaagacaaagcactcctggagggcagaagcagaggacaaagggatatgcttggttcaggagaaaacagggtctgataggcatggaggcagcatagaaataattggttttcctgaagaagagactcaagggacaataattgaagatattctagaagaaaacttttttacccgaaaaacatattgtccagctgaccacattctaggcaaaatcaaagaaaaattttctcagttatgttctgacagaatttcaattctttcttagtcacccatctccctttttgtctaaccctgtggccttcttagcttagcctctgctcttccgatgcttcagctgccatttcaggggctgggtgatcaaattgcattgaggatgataaatagtttctcatagaatggcaggaaaaaattgaacaaacttcaaaagaaaaataacagattacaacctttctccctaaaaaagaataaaaataaaacagatatcaaaatttttatctccagcattaaatagcaaaagaaaatgaaactaatcccacagaattttgacgaaaagtggtgattcagtaattatgtgtccacctaaatctctcatatttgaaaatagcaggtagccattcttttatatacaaggcctcagaaaaaattatcttccgtgttctttgcttaatgtgcactcaaaataattgagatagaaaagaaaaattagaacttcagccaggcgtggtggctcacatctgtaatcccagcattttgggaggccaaggcaggtggatcacttgaggtcaggagttcgagaccagcctgaccaacatggtgaaaccccatctctactaaaaatacaaaaattagccaggtgtggtggcagggtcttgtaatcccagctacttggaaggctgaggcaaaagaatcacttgaaccaggaggcagaggttgcagtgagccgagattgtgccactgcactccagcctgggcaacagagcaagactgtctcaaaaaaaacaaaaaaacaaaaaaaaaaaagaaaaagaaagaaagaaaatatagaatttcatagtagtacaaaaggacaggtggcaagcaccacaaacaatttaaaaatgtaatctaaataattgttgtaaatctgagaataaatgcaaaatagaaaatgactcttaagctaaattaatctaataaagaccaagaagttgttgaaaattgggagggaggtggcaagggaggaatatgcattgtcttaaggggagaaacccaagagtactatttcagtgttgactcttatatttagaagaaataagattaaagaatcctttgaaacagcatgaaggaattcaccttcccaacactgcagaagataaaagggagaaaacaaaggaaaacagacacaatggttaaaagtgaaggtgtaaaccagaatgacataaggagaaaaattcagtgagtgtcatgggtggattagggttagggcttcaaaccaccctgttataagaaccaagactctgtttttacacttaattcaaaatataagagaaatacccaatcaaagggcaacaaaagcttaaaaataagaagatggttcaaagtgcaccagcaaaagactgtcaggcaaatttcacacagctattagaaacagcaataatattagtgcccaagaaagtgaattggagaaagaaaagcattaatcttgatcaagggtaaaatccatgatgagaatatagaggtcatgaactttttacctgccgaacatggttgtatcagaggatggccacaaaaacagaagtgtacttgcaatatgaccttcgttccttggagtcccactgaagaagggaaggaacaagctgaagcacagcgagggaggggctccgtcactccagatgcgcagccagaggagtgaagattcagggtgtgcaggatggccagccagtcttcaaatacttgaagacttttcatatggagagcgaaattagtcttgcacatgatggctctgggaaacagatctagacaggccccaaaagtgatgggaatgcagtgtttattcatcccgaggaacagctttccgatagagtgaaagtctactccaaagaaaacggtcaaccctaggagacaggagcctgctgccaggcagcctcaaagcgggagagcacctgactgccgttgaatgtttaccgcgagacagacacatggtaacagatggaactctcaccatacactgaggtcactgccattggcatccccatgttgtaggttagagaaccgagggtgctgtgaagcttaggtagtttgcccagggtcagttagtagggaggtgatagactagggtccaaactcaggtggtctggccctggatcaagcactgtctctgtttcgttctctttccctctcctttccctttcttgttgcttccctttatctctcattgacatggtgcagggcttatacttgatggcttttaaaagtcattaccacagagattctagagctttgtatttacagctacagtcaaataagcagttcaaaaagaaaaagtttatttccttctctcattaaaaataaaaatatctggagaaaagcaacccaggcccggtaaggtggctccctgatgtcaacaggaacccaggcccttccatctttttttttttttttttttttttttttgacaagttctgactcctgtcacccaggctggagtgcagtggtgcaatcacagctcactgcaaccttgacctccccggctcaggtgattctcctacttcagcctcccgagtagctgggactatacaggtacatgccgccaaacccagctaatttttttttttttttttgtatttgtatttgtagtagagatgagatctcccatgtttcccaggctggtctcaaacttctaggctcaagggatccgcctgcctcagcctcccaaagtgctgggactacaggtgtgagtcaccatgcctggccctctttctatttttaatgtgtggtttccattctcagcatctcaagatggctgctgtgttccagtcattccatttgcaagaggcaagaaagaggaaggactagagcatgatgacttttctcattacctcatccaaggactcctgcttgtatctcctgaccacctcttaggtcttgagttgggaaatgcagtttttcagccgagcatatttcccaagagtctgttactaagaaaggaaggaagacagaatattgggttaggcagccagcagtcctagccaccgtgagttattgctgagtgatggtggcactgtgctatggcaaatcagtgtggttgaaaagttatctgctgctctccactcagaagttagtggcactttagttagtggcagagaaccctcagtttggataaccagtccttgtggcacttcattaaatataaccaagcccttatattaaagactgttctctcccttgcctcttttaccttttcagggctagtgacctctcttgaccaacaggaatgtatgggtgtaagaaacttctgctagcttcttctaaatgtctgcctacaaactcctcttagtgtttaaatctgctgttcaatgaaagaaaacagtatgtgatgaaccattcagaaaggaagcttctttttacttttcaggctggatagctctgtgtccccataagcacacatggaagaaggaaatttcttgtactggcttcttctcaatgtctccatacaaattctttttctgctagaagcttccattcaatgaaagaacacagtaaatgatgaactgatcacaaagcaagcttctttttccatagatcgttttctaattaattgatgtctcctaaactctgtgcagacaaatttatttggctttggaatttataattctagcttcagttttgcctgctttgtgaaaatgccataatcccattagtttttctttaattgctcttattctttatagtagagaagtatgcaaaacaactctacacatttaagtgcacacaagaattatgtggattatcagaatgcaattacatttcaagattgtagtgagctaattttcaatttggaccttattcttttttctcctcttcctttttatttttgcctaaacaccactacttgaaatgataactcattgaaacttttataaatgaagtagctctcaatttgttctttagcactgccactttccgccaaggctttttcacttgttaaatcatgacttattaaactgatgtaatgttacccagattttattttcttttatgctacaatgctccttgtagttccagtgaggtttcaaaagcccgaagcacagtattcagtattgtgcacgtcagacttttcgccaaagccttcagtgggctgctttataataactatgaatataatgctatcaacattttagtggggtattactaaacgagctatattactaataagaaaactttacctctgcaattttggttacagtaaatgaccattatttatttagttgttcccttttgctaaatacaatttcactgcagcctcttaatggagagagaatatccagctttaaacattggttctgttttgctgtttcattttaatttaatctagtttgaaattgcattaaatacatcacggcaatgtactaaggctttacaatttctattgaggaagtgtataaccaaaagtttcctgtcagctggaggttagtcaagccccatgagtttaagcaccagccagcatttgcctgcttgtcaaaggagaaagaacttcctctgccccaacatccctcttgactgcaagtaaacttattgcctgtcataactctaggagtattcttgcctcacagccctgaggtcttagaccctgagtgcagcaagccagtgggtatctgccaaaggcctcaggctccctctaggctgcccctctgcttgccccctttttctcctcataactgccacctggcagccaattaaaagtcagagggaccaagtggtggcccatttggggaacctcaggtcactatgctgttttatttggtttttgcaatgacacttctttgtctgattttaatttgaacgaatataataaaaaatcaggagtctacatgaaaacccaagggcctggcatttcttgggaagtcagatctggccatactggatccatactctacactggcagcaactagatggaactcagtcatggctgaaatctctggcccaagcacaaaccctccagtttgccacagtatccttgacaaagaagacgagtatcagctatcatccgttattgtgtttttactgttactttccttacagtagaggaaagtttctgttcccacacacatctgcatcaaaaatgagagaaagatggaggggaataaagagaaggagaatatttctctgacaagacaaggaataatcctatacttttcaaaagtaaataataatctgtttctttccttttcttttctgcctagcccctctatatccttaaatttcaaccccagatacaatttctgtggcagattatttttgccaaaaatggccaccacatccaatgcattcccatgtcctcttccagagccttgcccctcctacatgaagaggtggagtctaggttccctcccctggtcctgggcaggcctttatggctatctccatgaatcgaatatggtggaagaggcactgctcaacttccaagactaggttggaaaagaatatggacctctctctattggctctctctttctcagaacactttcccttggaacccagccaccacgttatgaggaagcccaagctacatggagaggccacatgtaggtgttctggccaacaaccccagctcagatccagcccttagccaacatcaactgcaaggcaaatcatgacaatttgttgtcacatttgaatacccagcatattttccaggggaaagaaaaaggattgagatagtttaattatcttcagatgatttcagcccccagcccctgagtcacccctagcctttgagtcttcctagctgaggccccagacatggtggaacagagacaagtcattccccaccttgccctgtctgaattactgtcctgcataagctgggagcctaatggttgatttttaccactgagttttgaaacaatttgttacacagcattacataactagagcaactccctctgagaattgtttctaggtgctctttccacctgtttttgtgttttttttttttttcaattaaaatctgattgattgtatctcgggacagaaaaagacatactgaatattgctatgtctacttttttttttttaaccactgtcaccactttatctattatcactgaaataagcatttctctaacatgcttcaggtcccatgccctacagaggctgatattagtcaacacctgacaaacagggaggttcccaacagcagtcagcggcggtacacggggaaagttccttgcaaccatttcactctcaacgaggaagaggattgctttaaggcactgatttggataaggaataactccatcaccacagaaggtaaggatgtcggtaactgtgcatctcttcagaatagcgttttatttttataatgagtctcattcttcatctagttccagtatataattagtgcctaattaattccaaccaaatcattcatctgtcatgctttgttttccagattaatttacaacttgttgtcatttttggatacccagcatgtttgctgggggaaagaaaaaagcttgagatagtttaattatctataattattttattatacaaaatgaatatccgaagagcaaagcatggctaaaatcattaactagttaaagaataatttaataagcaaacatgtttagcaattatatggaaaatatgtcttcttttgtgaaactgaaaagacctaggaagaaaaaggcctgtattggaagggccttttcttcttttcacaacccattgttctctttcttggtgttgcctgaacagttcttcccacaaatacacagactcgagttgcatgccactttttaaatcgaaatgaaaaagggaaacatttgtgcaaatgcctctgccactcaaaagtgtattctcaagcatctttctattgcttgaatttcattgaaatcattcagctagtgaaacaaccagaagagagcctggctacctttgtgtctttaattgaaacctaggagtcaaggtttggagataacttagagcagcccctttcttttgcctaaaagtgagaagatggttagtgacctggttgagttccacagccacctgtggtttagagttcagtccagggatgtaaaaccactaagtgcccagaaagtgagcatcactgtgtaaaattaaacatgctaatttatttaatacatgtatataaatataatctaattatatttgttaatacattaaaattaaatataatttattctgatttttggtggaccatttaggtattaacttttgccaagttataacatttactgcattaagaagttactaatttactacattcaacattttaaaatgagtatcaaagggcattcagtgcgttgctggattcaatttgctgatactatttataggctatttgcctctaaattcataaatgagattgacctgtagttctctcttttatgcattgcttgtcaggtttttggaatcaagggtatgctagtctcacaaagcatttttggaagctccccatattctttggggatctgaaatacaaagtaacttaagggttgcacagaaattacccataaaaccaactgagtctggaacctttgggtagaggtgggatatatagatagattataccggcaacccagattttttaaatgtcataaagtatttcatactttcatccaagcttggaattattttcagttttgcatctatgtatgtttaaacctgttttagccttttagtcattctgtagtaatcaccccatgatctatgtagactcagagtattttcttatcagggaaaattctctaatccatgggttggtgaatttttactgtaaaataccagtaaatatcactctggggggccaaggtgagaggatcacttgagcccaggagtttgagaccagcctgggaaacacgggaaaaccccacctctacaaaaaatacaaaaattagctgggcatggtggtgtacacctgtagtcccagctacctgggaggctgaggtgggaggatcaattgagcttgggaggtcaaggctgcagagaggcatgattatgccactgcactccagcctgggtgacagagcaagaccttatcttaaaaattttttttcttttagactttgcaggccatatggtctctgttgcaactcttcaactctgctcatttagtgagcaagcaactatagacaatatgtaaatgaatgggcaggtttgtgttctgataaaatttatttattaaaccagacatgagctgtagtttgtagtaaccagcttttagccataacatttttgacaaatcattaccatttcatgaagtccagacctccaaatgtaccataagttccccaaaagcagaaaagccagtggttcaagacaaaatgcacagttcatctttaagactgcacccaatcctgtcagcctgcagtgctgtgctttaactttgaacctttgtgtgttttggttgtttgggctagggagcatttgaccaagaaaagagccttcgaaagtggcactgcaaggtcttaaggtggaatattgatagcagagaatttagaaaccccaaagcaagaagcgctgtagtctctttcatgtgcctttgtattgtcctcttggttctcagatggaggaagagcatcagtgttattctgctgacttgcccagttgtcagggatggtgatgctgtggtgcccccttaaagggaaatgttttttcaagatttaagactgactcccagcagccagtgcataaagccatttggagtgcctgcttttgtccaccaaatagccaggataagaagtatgtggaaattagtttcctgtcttacatgtaggtgattttctccaggtctggtgcttaatgactcccccaggcacctctcaggtaggtgctcttaacactgaaatgctaggaccaagctctgggagccttcagggaaacctgacctggccaagttcatttaactctgtgtagaggcccttttcaagtaaattctcaagtaaaaaaagttaagaaaaaatgttaacatcttgccttaaaaaaactttctcctctttgtatcttttctgtaatccaggtcatactcagacataactttagtcccattcagaccttattcttgccattattattcttgcagcatcactggatcacagtccaaatctcagagcagaggaggcctaggacagaaagcccgtccccacctgagccaagaaccaacaaccacagacagaattatacccacagaggctcccaggaaatgcagcaaagagtaggatccagtgtgagaggaggcctcgaggtagagcctcctaaataaaccattggcttctctggcaggctgaaatacatttagctgggagggcattccatatagaaatacaaattcatgccaaatcacttcagtcaccttgtgacctctatttcttaactgagactttgggtatatgatacttgagtttcattgctgggctttcaaatcccttttcatactgcagaaagcctagtgatctttccagaactgcattttgaaaagaatatagctgttgcagcattgcttctgagacatctacagtaccatacttggctgaagctccaagccatttctttgataatttcagctctactctatctcagtgtcacttgtatccagcatagtgcctggcacatagtaaatgcaaaataaatgttttactgaatgtaagtgaagacagttcaggatgtaactcttttccttacctcccacatggtgagttttatcaaaactttttgcattcggcctacctggaaatagatggtcaattgagatgaagacaagagaacccttgaatgaaattgaagctattctttaaaaattcatccttagtaatgagagtaataacatgctggctacacaggatgagttaagctcctcctcacgaataacagacatttataaagtcagtctagctcaggttctggagtcacgtgacttgggttcaaatcttgggtctgccgtttccctgggcaagttacttaactgctttgtgtctcagattctagataatatctacctcacatgggttgctgagagggtgaaaagagataaatgagattacatgccatactcaggacagtctctcatacatagaaagagtttcatagaggctgccattagcattgctcttacttctatgtgtgatggaattaaaggtaccctagagtagaagtctcagcccttgccaccagggccctgatgaagttgaggatatcagtctctatttaaagacagggatccgtgtacaccaggtgccagtcagctatagaggcactgtggccttcaggagagccctggaggctgtgaagtttggagaaggcctccccgagaaaggaggatttgagctcagtcttgaagagggacaggataagaagagagagaggctgggggagtttggattgtgtccaaaagacactgggccaacaacgtgggctgggcagagtctgtgaagggcagcagcaggagatgaagccagaggcatgggcagggacagacactggcgggccgcaagcacccagccacgtccaagtttaactggttaccttttagggatgggagctgaccaggcgggtgccgctgtacacacatagcactttgggaaaatggcctttccatctgtagtacccatgccagcagagagaaggtgaccacgggagaatggcttaccatggatggcagtagccaataggggcgaggcagctgtggatgcaggagctagctggaagtggccacccttgctgcatgtggtggtcttgctgacacagccactgctagcttatttccaagtcagcgatgagatggtggtgttgcagggcttttccgtagttcagctaaagatggggtccttgtccgtcccgtggccacgaaaacgtagcctcgcagacggtttgaagggtgagttaaacagggttttactgggtgaaaggaaaaaaatggggtggaggagggggaagcaggatcctccgcaaggcaagccggctacttgattcccaggttccacacaggaagaggaggggccaggctcctccccactgcagatggcatgcatttccggaggctccaccccaatgtgcaggctggttggagtttttctagggactccctcccacctgcctgtctcattggcatttgaagccagaagctagaagtctggcacatgatggaaagcaaggagcagggctgtgcttatgcacgtttgaaaagtcgcatggagccatccgtgaccgtcctggacatttcagtccttgctttttcttcatgtcaccctaataacaccaggaggaatgtggacagttttcatcatagtttatttttactccctcagtgctaatttccccttttttaaatactttagcatgtgagttggggcaagggagccaaggacagtgaaaaatagtttcatcgtgtcccactggctgtggttgggtgacatgtccctccgggaaccacaccctgaatcctaacaaacaccagtgctgatgttactgaagcccagggatgtgaggggagaatggtggatggattgttctagaacagtggatattgggcatcaagaacaagagatactcccaggaggaagtcggctctcctttgaacttctacccattgcagacgcacacagataccaccccagagagtagctccttcccacagtcactgttgtatttcacatcttctgcttccaaaggagaacacagtggttctgtgatggaattagtccatccagaggacatggttttccgggctctagagttggatggatttatagaagtaaattaccctaaactattagaactgctctagtgccatggagaagagctgacatcacaggctcaaatgctgctttcaactgcaaacaaaacctggagtgttctgctggggggtttctgatagaacccagcaacccgatacattataacaatttatggcactaattgaaactaattgaaattcatctgctattacctctgtactttccatgaaaatgaaaagtaggatgaaagtaaagtaaaaaaaataaactaccttaatggctcaaaatggatcaattattttcatctttagctaaatacagtttactgccttattaaaagcatgtttgtaggaaaagtataacattaaaattccactgcatgcatcatcgaacagaggctttgttatgttatatctaatatattcttccctttttattcagcagagcagaacgggacaggtcacgttttgggcatagaaatcttatgctttggcttctaaaaagtaaaaagcgcattgtctggttctattcgtgggctatatatatatatatatatatatatatatacacacacacacacacacatacatatatgtatatacacacacatatatacatatatgtatatatacacatatatacatatatgtatatatatacacgtatatgtgcatatatacatatatatttcattaaaatacaaaagaataggtaaatatgcatagacataatttaaaatatataaactataaaatgtaacatacacatatatgtatatgtgtacatatatatatatacacacacatatatagacagaatcttgctctgccatccaggctggagtgcagtggtgcaatctaggctcactgcaacctctgcctctcaggctcaagtgattctcctgcctcagcctcctgagaagctcagattacaggcatgcaccaccatacccggctaatttttgtatttttagtagagatggggtttcaccatgttggccaggctggactcaaactcctaacctcaagtgatcctcccgccttcgcctcccgaagtgctgggattacaggcatgagccaccactcctggcctgttttttaatgagtgtttatttcacaatttattaataatctgtgattgctacttaaaaatatttcattatctagttatttgctgaagatatttacccatataaaatgccagttggagtatattttagtaacgtgttacatatccatctgcaagtgtactgcagtgctatgagacctgattttgaaatagactcacagggtttgagtcctggtgacccacctgcttgccatgtgacctgaccttgagctcaagatttaacctctctgtaccttattttctggataaaatgataaaccctgtctcacaggcctgttgtgaggatgaatgagtcatatgtaaccactgtatgtctgttttgaagcagaaaaaggaaacataattattcattaaaatacaaaagaataggtaaatatgcatagacataatttaaaatatataaactataaaatgtaacatataattcttgtttctctggccttaaaaatataataactatgaagaaaacttcatgttaatattgtgtgcataaatcctgaatttatttcttatactcttgagatctaacttcatggccagaccaccagaccagcaaatctttccctccaagtcccgattctctccatggagaagcttcatctttatagcattgagcgtgaccatgaaatgacagcagagcacaatttccagatgttttaaagtcaagcactcagttcaaaagaataaaatgactttttagcatctactaaaaataatttctttaaaagttgtcccattacttttagggtacatctatgactaaaagaattagcactttattttacttcttgaacttaatagggaaatcaacttagttttcctttcctgcgaagtcattttacctttaattacttgttttctaactcctgaaactcttacatactgcctttaggaaccaggatgatgaaactggcatttttcccccttgattaacataaattgaagaacttcttgcatcttggtgcattattctttttttttttttttttaagacagagcctgtctctgtcaccccccagtggcacaattgtggctcatgcaacctctgtgccctgggttcaaatgatcctcctacctcagcctcccgagtagctgggactacaggcatgatccactatgcccaactaatttttgtgtgtttttagtagagatggggtttcaccattttggtcaggctggtttcaaactcctgacctcaagtgatctgccagcctcaacctttcgaattgctgggattagaggcgtgagccaccgcacccagccccaggttgaaactttaaaatgtgatcgctttatgtgcatggtcactgtcaaagttgctgatttgttcatttacaccttgagaggccaaggtgagaggatcacttgaagccaggattttggaaccagcctggtcaacatagcaagaccccatctctacaaaagttttttttaaaaactagccaggcatagtggcacgtggctgtagtcccaactactcaagaggctgaggcaggaggattgctggagcccaggagtttgagactgcagtgagctatggttgtgcactacactccagcctgagtgacagcaagaccccatcttaaaacaaaacaaaaacaaaaacaaaaaggtcatctctacatttctaccaacattttaattggcaagtgctagttcccttcagtctgaagtggggaattgacagctcactcagatattgactgcatcatcactttccgtctctctctcccctgttgggctgttgacgctgacaccctccttcctctaggaagcacccttgcacattctgtttcaaaggctgccactggttagcagtgcgagaatgacttcgggctccttcttgcttgccagctttaattttcggagcttccacacagtcgcctttttacgggtgctctgcctggaccctactgcccgtctcagatctgcaatcagagtaatgcacgatttattcgctaaaaggagcaacaaagattggtcttccatgaaaactgccatggttatattcccttatcctttatggggaatccacccagagtgttcttatcatttgttatttgccatttgaaagtggggcagcccatcctttacctctgtcacctgttaaatcgagagcaaaagctggtcatttctcatctgttaggtaagctgatctgggaaggaaacagtgactaaatcttttagcataaaactgatatccaggggaaatcatcagtttttccactctacttcttttatatgtgtctagaaacttcaaaaacagtgtatgtgatattccggtaatgtgaaggaaggttccatgagttataaagtacacaatggtaggtatacatgaattaaattcatctttaatatggacatactatatatccagaaaattaaaatttaaataaataaattcatatttaattaactgaagttttccggcttattaaaagcatgctgtaggccagtgtggtggctcatgcctataatcttagcactttgggaggccaagataggcagatcacttgaggcccagagttcactaccagcctggccaacatggtgaaaccccatctctattaaaaatataaaaattagccgtgtgtggtggtgggtgcctgtagttccagctactcaggaggctgaagcatgccaggaggcagaagttgcagtgagccgagatggtgccactgcactccagcctgggctacagagtgagactctgtcttgaaataaataaattaattaattataaaataaaagcatgctatcaaagaacatatgtcataggccccccataactggggctatcttacctgtctatacagctatcacgctgttctgtgccagtggaggcccagacaccccctgcacatactgggacacataactgtcagccccaacacctccctcaggcacagccaacagagtgtcccccggctccggtcattattcacttgccctcggtttgtcccgcccagcagctgctttctctcacatacttttaaacactttcttccttccagctcttacccagggattcaggaagatctgtttctctgaggcacctactgtttgactgtgtctctgcccccctttctttctctctccatttccttccttccccatatctccttcttgattcagcccaaaattgacttaaccgttgcaaaatgagttacccaactgctacttccatataaaatataagaaagcctggtcatccaacgtcacgtttacatctaaaagaaaaccaggggtggaaatctctcaaacttctacaaattcccagaagttatatcagcctcctgagtaactaggactagaggtgcgtgccatgcttaattttttttttttttttttttgtagagacagggctatgatgtgtttcccaggctggcctcgaactcctggcctcaagcagtcctcctgtcttggcctcccaaagtgcttggattacaggcatgagccactacattcagccctgtctttctttaaatagcacattaaagacgtaatttcttgtttccctgagcttaaatgccaccaatatgacaggagtattattttatatctatcatttgttgtaggcacacacaattttggttacattagggactatgtgggattttatgagcctacactggaaacctaataaccagatctaacatcgttaaggggaacatatttctatcttacatatctcaggtgtatagcccattctgtgactggatagttcttatagtgccaacttagtagtgaataccaagcagaaatatgtgctgggaaaatctggctacagtgagtcattttgtgctaaatatttacaggatccaaaagtatgatccagctagcaggaagaaagtcttaggatcagcaatctaataaatatctgacatatatccatgtatctggtcaggaaatagtactgtggtgataattacagtcacatctagtgtaggccacaggcactgtgctaggctccagggataacatgatgggtagggcaaacatggaccttacagtccaaacaagtcatctcgctgcgaagcctggctgtagcctggctgcgtaggccatggtgagtgctgggaaggaaaggtggagaccgcccacaggcctgctggggcctcacctgcctggaggctggacagtctgtggggcccagatatagctgtgggcagcctgaggccttgacatgggctcttcagaagcactggttccagctcatccatattagtaaattactctgataaatgtaagtaatcatatttttaaaccagtttgatttgtcccaaaatgaataatcaaagtttttgtctactaggcttttttctggagggggccccaaaatataagactttggttattctaagagttagcaccatgcttatattttgctgtatgacaacattatatatgggcatttgagtgaaacccatgttattgttcacagttctaaatgctattgttatcaataatgataacaatatgagggattatgtataaaagtacctaactttgtgcctggcatagaggagtacagagataaacatgaactggatctaaaaatcctttacaaagtaaatgtgagcagtgttgcagaaagaactcacaactgcacaaagattatgaaaagaataacctcccacagaatggagacatttaaaggcaagaaattgggccagatgcagaggctcacgtctataatcccagcactttgggaagccaaggtggggagatcacttgaggtcaagagttcaagaccagcttggtgaacatgtcaaaacttcgtctctactaaaaatacaaaaattagcctggcatagtggtgcgggcctgtaattccagctactcaggaggctgaggtgggagaatggcttgaacctgaaaggtggaggtttcactgagctgagatcgcgccactgcactccagcctgggcaacaggcgagactctgtctcgaaaaataaaaatgaaaataaaaaaaaggcaagaggtggacctggtcaagaatagtaggccatcttacatattaataactagtttttatcatgttttattctatttgtggaaggatgtgatttgacctgtaacatgttttatttatttaatataacattatattatcacggcattctactatattttatgggaaatgaaagaactataactagtcttagaaagcctgtttaaatgaaaagtttgagatgaaatcactcaggcagtcatctcccatatgaccatgctggtttgcactgctggtcagtaaatattcatccttctctccctcctgtgtgggcagagtggacgtcctcactcccgtgctcatgggcatgaccatgacacttgctttggtcaatgggatgttagtggatatgatgtgggcagaggcttgacatgtgcctgggcccttgtgcttgcctttctgtgcacctgcatttccccatagatagcaaatgcctcaggtagctgtcaatccaagcaggatgaaacacacatggtgcaaacaaacccagccacaacctagagccagatcagctgacatcagtccacccacaggtgtgtagaccacccacaacgtgcttcttgtttgacattgagttttgacgtggtttgctatgcagcattattatgatgataactgactcttaagataaccgaagtctcatatttttgttaaacataaaggtagccaaaactgtttagaagtcacattatctagaaataaacctgtaattttgaaatcagatattttacaaaatgtattacctttggaattgaaaagtatcgtcctctccagctgcctgcagtccgtggaccacccttgctggatcagacacctctccaaaccccagcagcaccacaggcccagttttccatgagcctgtgaagaataagcccagctcacagtagagctgctaacagccatcatgaaagagaccagaaaatacaaaatccttagctgtgtgagacctaaacacacttaaattcgttcaactgaaaatgaatattgttttggcttgcctatttcaaaaggacagaagacctaaaaccttttatagttttcggttcaagttttgcctttccttgcaggctgattctttgttgtgccagacagccaagattcatgtttcgtagcagctgggagcctcaataatttaagcaaaatgttgcctctttcagccaaggaaaatgcagctcaccaaggaatgttgcattgtagcatctgaacagagtgggggtcatagccataaaactctcctagcgtcctagcgagggcaggaatggagagaccccactccctcacttcagtgccttcttggctttccatagatgaagagcagggagtatgggagaattttctagatgctgttagcttccaagaagccatctgaaagttactgtagtttatttttcctaagcaaacaagacaagccatcacacttcctttcaactttggattgaaaacaatttgggcatgatttcctcaaccaaatcaaattaatacacttgccatttattttggcttgtaaaattccttttcatattatttcatgaacaggagaaaaacagagagacattcaatgaagtgtacattttgtggtaaaattggtatatcttacctggaaaatgagtctacagcagtttatttgtgaaaatgtgaaaatgccaattcaatgtcaaaaatagcatatactacatttcattaatttaatagtgtcattgaccttaaaactgctaaaatagtagaatagcatatgtaattgcttctgtagtctttttgagaaatgtaaatagtatagactatttatcatcaaaatgctcttacacaagggaaatctgtcaagattattttgtgattttatttttgctaacaaaaatactgtctttcagtccctctagctaggtcttgacacattatattctaaaaatcagggttgaatctttgtaaaattatctggtgaaaagcagaatgttctggcctttaattctcaaaaaagggaaaacttccttgaaatcaatccagttcaacatttaaatattaaaatatcagtaacatcatgagcatgaatattttttaccattgcctttttgtctgtaaggaagaactagtatacattgccaacattagtaatttggtttccttaataagtatagcaaattgggaacaaaagcaagataaaaggtttttttctagacagtttctttcagcctaatttcaacttcaaattagaggaacataaatgaatgtcctacttctgcattaaaagtacttgactactttgtgggatgttttgtgctgattctttactaaatgatcttggtcgccgttgctaggtaacaccgctggcttcctgcagctgaaaaatgagagggttatacggagcaattcggcattattagcatttgactaaggttttttggttttctgaactgtatatcttagcgttttcccttctttcctagggaatatcattgtctatgggaatacaattgatacttacaccaccgtggagacgctcttaaaccttggcgtgagcggcagccgcatccacctcgtgcagcccccgcccgcctccaccatcacctgcatcaacaactactcggtggagagcgccgtggcggacgcgctaggagccgccggagtcactatgtaccgggatgcgatcctggcccagtggaatgacggcctgcacccagaccccatctacagcgcctccttcaccacacccaccaagcctttcagactccagtgctctgtaagtgggtccctgcaaacctcactcaccagccagggacagaggacatctccaagggatttgggggtctggaagattgcgggcagtgaatttgtagtaccagatgttggattttgttttctgtgtgttcagattacctcttgctgggtaacaacccaccccagactcagtggcataaagcaacaacaaccgtttattattcttatctctcctggttttttattattattttattatccttatctcttctggctttggccagactcagctgggaagttctcacttgaggtcgctcatgcggctgaagtcagcagtgggtgggctggaattgtctcaaaagcatagtcactcacatgtctggctgttgatcctgaatcaactttagttgagattttcaccagaacacttagaagtggccccttcatgggactggcttcctcacaacatggtggtttgggtctgagggtagagtggagagagaggcagtgtcagctgtgtcaccctggatgacctggcctctgaaatcaagcagcattcctcccaccacattctatttgctagaggcaagttgccaggaccagcccatattcaaggagtgggaaattaaaccctgcctgttcatggaggtcaaagatttgaatggagagcgcttctctttacggagagcttgccatgccccaggacattctgtcaactcatcaggacagctctgtaaagggaagtatccccagtttacagagaacgctgtggctctaagtcagtggcactgctggttccctgcccagcccaaggtctatgctgccattaacctcttaagattctggcaacagcagtggtgagtctttccccatgacacacaacttctggcaatgtgtatagagagagcactttcctttccaggtgggtgacaccccaccttccagcctgcaccctcagagtttacagcttaggaggttagtagaagccctcagggagggaaggagggaaggggccggtccatctcactgagaagcaggggaaccttgctcgaaagggaagctgaggtcggtatgaggataatggttgtgtaggtcaagggtgtgtgttaacggttgtgataaagaatgcctgctaacatccagtgggcaagccatttaggggcaggcattcacagcaggcccttacctaggagtggggggtgatcagcctaagtcagggcttctcactcaggtgctgctaaggattgagaatggtggctctcacccccaccccaacccagaactcaaaggacaggggctcaaagcagaccactgaaaaagactaaaaaggaagattttttttagaatctctcattttatcctgagatccatggaaattgtgtattctactctgtagttcattcatttattcattcattccataaatatttattgaacacctgctaggtcccaggctctgtcctcgatgttagggatgtaacagtgaaaaagacaggacaagtccactttattttaaaaagtgatactgtctatacatgtatgtcatgacacctatttaagacaggaaatatcaaaatatttttgcacaaattttccctcaaaaatggcaaacctggaagattgccacgtttattctggagcacctctagaggtgagtgtgtgccttgttcaggaagcagaggcctgagaaaacctccccaaacatcccattggatagcagctcttctgaccttcactttcctattcagattagaatcaaactcctgacaaaaacatctggcaaattaaattgacccttgaacacatgaggagtaagggcagcaaccctcctcacaaagttgaaaacccacatagagcttttgactctccaaaaacttagctactaaaagcctactgttgaccagaagcctaactggtcacataaacagttgattatatgaaaatgtattttgtattttatatgtattgtatactctatcctcaccataaagtaaactagagaaaagaaaatgttattaagacaatcataaggaagagaaaatatatttattcttcattaggtggaagtggatcatcataaagatcttcgtcctcattgtcttcacgttgagtaggctgaggaagagaaggaagaggaggggtgggtcttgctgtctcagggatggcagaggcagaaaaaaaatctatgcataagtgacacacagttcaaatccatgttgcccaagggtcagctgtaacctcaactgtcttgatccaaggcaccttcctgctacattttcatcctaacaccgtctgagtcagacattggcttgtttgctgttatattctttctcctaccttccctggtctgcttggtctcacaaagaatggcccctgcagatgacatttcccaggttccattattctctgattttcatctctatttgaacaatagtttgtacctgtgggagattaaacatgggaagcggggagtcagggtaggtatctctcatactgtctgctttgggcagcatctgtcagggcattaagcactttttggtggggatgaatatgtccatcctcttcactatggtcttggtgtcatgagttgaattacatcccctagaaagatatgttgatgtcctgacccccagtaccagtgaacatgaccttatttggaaataaagcctttgtcgatgtaagcaagtaaagagaaagtcatcctggatcaaggttggccctaaatccaatggctggtgtccttaaatagagagatttgatggcatacagggacacgcaatgaagaaaacctcacgacagtggaggcagaggttggtgtgatggcagctgcaagtcatggaatggcaggaattgctagcaaccgtcaggaagtaggaagaggcagggaagccttcttccctagagcctctggagggagcatgttcctgacaatacttggattctccagaactgtgagagaataaatttctcttgtcttgagctacccagtttgtggtacttcattacagcagccctaggaaacgaaagcagatgatgtcacagtgtatgtacctactaaaactatgatgttgataaccagaatcatacattatatactatttttctatttggcttcatttactcagcatggtgattttgagattccatatagttccatgtatcaatagttcattcttttttatggctaagtagtattccattgtatggatatatctcattttgtttatttatttgcctgctatgcacattctggtacatgcctttgtgtggataatatttttatttctcttagctataaacctagagattgtctaagtcatatggtaggtgaatgttgacctttttaagaagttgccatgttgctctccaaagtagctataccattttacatttccatcagcaatgtatgagagttccagatactccacgttcttgtcagcacttggtgttgtcaaattttagtcactcttgtgggtgtggcatggtgtgtcattgtgttttttttaatttgtgctttcctgacaattaattatgtttggtatcttttcgtttttttagtagccattagtatttctcctttttgtgaaatgttcaagctattataaatgtatttaaaattttgaaatttccagttgatcactgcaggtttacaaaatgcaatttattttctgtataaacattgtaacttgaaaatgctaaattctcttattagcttttgtagttgttttttaggtccataaacatgtcatgcaaatagaggcagttttactacttcttttctgatatttaggtcttttatttcagttacttgctttattctactcactaggacctacagtgcaatgtttaataaaagtgggggaaatagacatccttgccttgttccatatcccagagagaactttcaggctttcactgttaaatatgagataatttggctgtggatttttctttggtgctttttatcagactgaagaagtaaccttccattcctagtttgtttagaggtttttatcatgaacggctgttgaattttgttaagtgaattttccatatttcttaaaaagaaatatggaaattttcttcttaattctttaatacagtgaattacgttgatcgatttttgaaaatgttcagccagccttatatctctggaatgaaacctaattggtcataatgcgttatctttctatatattcctaaattttatttgccaatatgttttaagaatttttgaaactattttgcaactatattcatgagggatgttgatatagaattttctgtttcagtaatgtccttgtaaggttttggtgttcgagctgtgttggccttataaaaaaattcgggcaatgttccctccttgtttattttctgaaaaagtttgtgcaagattggtattttttctttcttggacgtttgacagaattaaccagtgaaacaatctgggcatggagtttatattgttgaaaggcttttgataacaaattcatttttttaactagatataaggctactcaaattttctgcttcttctataaatttttgtaagttgtaatttttaagaaatttgtccatttcatttacatttgtcaaatttgttggcattaagtttttcacatattattttgttatctatttgatgtctaggatctgtagtaataacccctcatttatttctgatattggtgaattgtgttcagtctctctgaccctctctctgtttgctgccagtctctctgtctctgactctctctctttctctctctctcccagtgtagataggggtttgtcaattttattgatctttttcaattaaccagcttttgagtttgttaattttctctattatctgtcagttttctcctctattgatttctgctcttaattattttcttccttcttcttgctttggatttactttacccttcttttttctagttccttaaggtagagccttaagtcgttgatttatataagcatttcagcataagttttccattatgtttgagctgcatcccataaactcatatgttaacttttaattatcacttaattcaaaatattttctaatctccctgtgattttttattcaaccttggattatttagaactggattctctaatattcaaatatttaaggttttcctaaatattatatttttaattgatttctagtgtaatgctgttgtgatcagagaacagtgttttaagatttagagccagggacggtaactcacacctgtaatcccagcacattgggagacctaagtgggcagatcacttgaggtcaggagttcaagaccaacctgcccaacatggtgaaaccctgtctccactaaacatatgaaaattagccaggcatggtggtacatgcctgaaatcccagttactcgggaggctgaagcaggagaatctcttgaacctaggaggtggaggttgcagtgagcccagatggcgccattgcactctagcctgggcgacagagcaagaccctgtctcaaaaaaaaaaaaaaaaaattattgagacttgttttatgtccaagcatatggactaactttgtgaacatataaggaatatgtattacgtattatgtgcttgttgagtttaatgttagttcaatatggttgacggtgatgttcgacgctcataagtctttactgatatttttatctcattctattaattgctgagagaagggtattaaaatctgttactattattgtggaagtctctgtttttccttttaattcttttgatttttgctttatctttttgggggctctgttattaagcccatgagcatttatagttgttatatctgccttgtgaattgtgccttttatcattatgaaatgttcctctttatctctgatatttaataatatcccttatcttaaggtccagattatctgatactaatatgaccattccattcttcttatgcttactgtttacatgatatatttcccatccatttactttctacttatctgtgtctttgtgtctaaagtgtgtctcttgtaggcatcataaagattatattaatgtttttagtgctgcatgacaaactgccacaaatttagcagcttaaaataacatccatttactagtttatagctctagtcagaaatgcaggcaaggtgtggctggcttctctgcttagggactcttaaggctaaaatcaaggtgccaatcaggctgcattctatctggagcttgaagtcctcttccagacttgtgtgatagtaatagaagttaattccttgcagctgaggacagaggtccccacttccttgctggcccagccaggggctactctcagctcctagaagccattcatatttcttgcctcatggccccttccatcttaaatccagcaacagagaatcttactcatgtcaaattcccttcatatttcaaatccttcttcagaaaaagcctggtcccttttaaggtttacctgatcaggtcagacccactgagcatgatctccctgtcttaaagtcacatgtgccatataacatcaccttacacattcacagttcatgcttgtacttaaggaagaggtggaatcttgggaaccaccttagacttctgcctaccacatgctttttatcctttctatctctgcattttatttaaagtacttagaccattaatatttaatgtaattactgatatggttagatttaggtctaccattttattatttgtttactgtttgttccctcttctttcttttctgttcccccttgcctgctttctttaggattattagagtattttttagtagtctatttcaattggctctttattttattttattttattttattttattttattttattttattttattttgagatggagtctcgctttgttgcccaggctggagtacagtggctcgatctcagctcactgcaaactcctcctcccaggttcacgccattctcctgcctcagcttcccgagtagctgggactacaggcggctgccaccacacccggctatttttttgtatttttagtagagacggggtttcaccgtgttatccaggatggtctcgatctcctgacttcgtgatccgcctgcctcagcctcccaaagtgttgggattacaggcatgagccaccgcgcccggccttcaattggctttttaactatatcttatcttttagtaattgctctatggattataatacacatcagcaatctttcatgttcaatagagttaatattgtaccatttcacataaaatgtaaaaaccttgcagctatgcagttccttctccccatattctggatgtctattttgttaacagccatcctatatcttacatctacaaacactgcaaaatcagtaaggcaatattgtaatctttgttttaaggtcatatgtattttgaagaattaaaaagaatagtcttttatagatactcagatatttactaattttcttgttctatcttcctttttgaaaatccaagtcttccttcagcctaaatgagcttcagagcatttattgtattgtaggtctgctaaaaagtaattctttagttttgctccatctgaaaatatatgttgctttcattcttaacgcttattttcactgaatatagaattctgggcttataggttattttttcccagcactttgaagatgcttttccaccatcttccaacatccatgcatttttgtttaaaaatctacaatcatttaaaacattcctctatatgtcattttccattggctgctttcaaggtttgctctttatccttggtttttagcaatttgatgctgtgggtattctgtgtttattatgtctctaagcatggtttgttttttttgtttttaatttgtcttgtttggcgttcactgaacttctcgaatccataaatttatgattttcactaaattttaacaagttattggccattctttcttaccctattcttctctcttctcttcctgggattccaattacatatctgttaagagttttttatattgttccctggggctctaaggctctgttttttcagtctcttttttctctttctcactattcttcaaattggacagtttctattcatataacttcaagttcactgactctttcctctatcatctctatttttctattagggcataagatgactgcagctcacccttttataaaaaacctctaaattgaggccagacacagtggctcacgcctataaacctagcactttgggaggccaaggtaggtggatggcttgagctcaggaattcaagaccagcctgggcaacatggtgaaggccatctctacaaaaaaataccaaaaaattagccgggtatggtggcaagcacctgtagttccagctacatgggggggctgaggcagaaggattccttgaacccgggaggtcaaggctgcagtaagctgagatcttgccactgccctccagcctgggtgacaaagtgagaccctgtctcaaaaaaaaaaaaaaacaaaaacaaacaaacaaaaagactctaaattgaatacctgtatgtggaaatggagagaaaaggtaattgaaaaagcaaacttaaaaaaaaaaaaaacacctctaaaataagggaaattatccccatcctggtcatttctccaagtttttactgtaatacacaagctacccaaacttttaaatactaataagaatcctcttatatcagagtttatagttattatcagtgggattcatctcaggaggttataccaccaaggcagaagcagaactctcttgaaattgatgttttgtccccacatcaaagcctctccacatcctgcctgatagtggcgcctcctgggctcttagcaggtggtccagcctccagccaggttaggatgcagtgacactggctctcaaggcagactttcccatcttgttggcattcatctttccaattagatcatgcgctccatgcttatgtttttcaccaagatgttctggagaccttgcacagtgcctgggacaagaagtgtttgtctgaatgcatgaatgaatgaagtttatcagactactgactcccacccttctccctagctaaccaaggagttttgctctccttaatcagaattatcaatataagtagtcttgaaatatgtactcagaacatcagtgtggccagccattacctcttcctatttgtacccaatatgtagtattccactggcgttacagaagcacataggttgtatttgcaaggtctgtaacttgtaacacatgttcttattaacaatgttggatttgcttattcagttttcactccagtctacaaactcctatgaaaccccaaatgtagccaaaattgtgaatgcctacaccaaaagtgtataagtaaacattactgcaatactggtaacctttaaaacccagaaaaacaagaactagtatatttaatgtactacttaacaaaaagtaggcttaattagagaaagaaaattgggtaggtagaagaacttctgtgaggatgctgaaggagacttctaaacattttcaagggctcaagaggttgatagcactgtttttatttataatttaaattcaaatcagatatctttctatatatttatctgggtaggaaatctattttttatagagatggggaaagagaatgagaaagcaaaaaaggagtgtagggagacagaaagattcagaatcagagagagactcagagaaatatattttcctgtggccactgggtaagagttataagacagaaaaaaaaagaaaaagacttgaaagaaagaagcatcctgggatgggattagacaactaggtgaataaagacaggacaagggcacagagtgtatctccctgagggaggaccaaggacatcatagagatgatggatctgagtgctgctgtccaatagaaccttcttcaagatggaaataggctgtatctgcactgcccaatatggcagccagtagccacctatagctaactgagcacttaaaatgggctattgcaactgaggaaccgaatttttcattgtatttaatttaaattaatttagatgtaaatatttatagccttgtatgactagtggctaccacagaatcagaaagctccctgaaccattcatgggtgtggggcaggaatactgaaggggctggctacctcttgcccaaggacagctgatgtctatacagaatgaaacagttgaggggggtaaagcaggaatgtgatggaagtggggagatgaccatcagtatggttgggacccatgtcttatgttcattttttagcatgcttttaataaagtggcagactattttagggaaagataaaatcaattgagcgtgtttcaattggtccaacaactaaagacaaaaacaactaacttgcactgcttcagtgactttcaacatcagtgtggaagacgatgtccagatgagcatgagaaagcattgaaatttgagcacagaatggagagggcatacaaataatttctaaggagcatgcaaaggggttggtggcccctctgcttatggcaccctcacacagtgcctggcatatggtaggtatgccatcagtatttcttgaatgactctgtgtcgtatgagagcaggaagcaacaaggcaggaacccagacctagtagatacagagactgatgaagcatccatcttctctggagcatcatatagggacaagcttactgagttttaaaagctagcaatgggcagtctgaaaactgaagactggatgagatcaacccaagaaggaacctgcagagacccgagtgtcagacacaggaaggggaagaggatggaggctgcgctagagctgttcaaaatgtaggagcatgaggggaaggcagggtctgtacaaatgtaaaccctcttccgccgaaaaccactcacacttttgtgggagatatttcatcacctggcatccttctctccactggatgagtgaattgagtgaataagagtgacatttggggatcttaatgggttcttcatgcccaaggcaatctatctctcatacgcacacaaacaacatgatagcaaacttttagtatgtgtatttttgtgccccgaataataaaatgccctggagactagtcacacttttgggaaggtaaaatgaagagtgataactgaatattgctgtaattgttcacttcgtagatgttcttcagcttctgtgagaagaatgtggattatgaaacgtttaaagccctcaatgatgcatgtcttgtgtatgacagtcgacttgtgattgataccaacttccacaccaacgacatagccatcagagctgctggctccctcaccaaattctccaatagatactactcaaatgagtggactcacagcaacttcagttccaaagaaattggctttcagctggcagcagctatgctacatctctttgatccaacccttgagcctgtgaccgagccaccagctaatcttgaccggctcatccccatgtacaagggagccaagattcaaggtatacgagtaggcttccttctccttgatgaagccacagattaggtatggctcagcagtcaggccagtcctccaggtttctcttaggcttggggaaaaggctcctccgtacctcaatgggttgccacagagacagagaaagggtctataatttctgaagcatttattacaaacctggaattattgttattacggttctttgcatttgagcatttactatggaccacatcctaaatggggttcccactttacagataagaaaacagacaagggaatgattattaacttgtctggatgtctcacagctggaaaatgatggtttgccctgacatcttacccaaaacttccattctctctgtaagttcagagataaggagacccttccaggcagccaggcctcagcctgctctggggatggataagcttaaccatttgcagctgtaaagcagtgcacttttatcccataaacccttctgacccctaaggaggagatgatttcatgagtaatgcagggttccttcacgtttagggtatgagaaatacctttgaaaatggtgtttctgaatgttgtggaccttttaccagaaaaatgcacatatttacaaaattacgtgttcccttcctggaggtttatagatgaacccacaaagctgtacatagacccccagggtgtccatgaagcccagtccagtcaatggaatgtcagattacagagacgaaagccccacattccatccttgtcttcctcttcctaactaggcagccccacaaggtcttgctctgcttctcactctgggtgagacctgaggaaaggtggtggccgtaggcaggcaagagaagggagggctgtcagaagccagagctggcacaggcccagacctcaggaacaaaccaaaatattaagaattcgataatgacagtttctaaaacattgaacaaagaactttgttgatagtcctaattaaattcaattttttaatattttggctacattttggagaagtgatgaggaataggaatgctgtttgcaacatttaaggcttctaaaggtcttgatctggttttggcagatacaggttaaagggcggggagctccggataatcacaggatacacaagatcggcttggcacatcctggagcaatggcggctacattatgggatatcatatcacattcacatcaatttggttaaataaacgtcaaccaccccagggagttccttgttgttagtggtactttagtgtgaaagtttgaggagcatacgccactgcaggcatctgtttgtcctgtgatgaaaatatgagctctgttactcacctcattaacaattaattttaaatggaaaacttgccatctcttctagggggcattcttcctgggtcttaccattatctgcatattgccaagcctgccattccaactcccttggaggtacaaatggcacagcctaattatgtaagtattatttctgaatttcattttactttcaaatacaaaactttgtttataagaggatgaaattctttacttggagtctttactgtaatgtgttggttcacacatcagaagcccactggagtaatcgtcccccaagatggcccttagtgactctcgcaccttggtcttcatgcccttgtgtggctcctcccacactgagtagggctgacctgtgtagccaacaggatattggggaaatgactgtgtgacttccaaggtcaggtcaggtcaagaaagatacgacagcttccagcttgcacacttctagatgacttgctgccatgctgtagggacgcctttagagaggtccatgtggcaaggaattgaggactcctgcaccagtcatgatcagtttgccaggcagacgagtgtgccaccttgaagtggatcctgcagcctccttcatgccttcaggtgactgcagccccagccaacatcttgactgaaaacttatgaaaggccttgagccagaactccctagctaagccattttcagcttctgactcccagagaccgtgagataataaaaatttattattgttttatgccattacttttttcaatagactttattttttagagctgttttggtttcataacaaaattgagcagaggtacaaagatttcccatgtaaccccaacccttcaaaagacatatagcctcccccactatcaacatcccccaccagtgatatatttcttacaattaataaacctacactgacacattattatcaactaaagcccatagttgacattagcgttcattcttggttgtgtacattctgtgggtttggacaaatgtataatgacacatatccaccattacaggattatacagagcagcttcactgccctaagaaccctctgtgcactgcctgtttgtccctccctctgtcctaaggcctagcaactactgatcttcatactgtctcagtcactttgccttttccagaatgtgatatagttgcagtcatacagcctatcgtcttttcaggttggcttctttcacttagtaatatccatttaagcttcctctatatctcttcatggcttgatagctcatttctttttggcactgaatgatcctctattgtctggttgtatcggtttatttatccattcacctactgaaggacattaagcctctacattttgaggcaacctgtgatgcatcgatagataactgaaatatccactttcatgtcaatggagcaagtagattgcttagcatctggaatggccatggagaccccactgttttcctcccctccaggaaaagcagaagctgtgcagttgggaattctgctgtttaaaggacacaggtggttggtcagttgaagagctcctctaataagattctctgacccatagtcccagcccggtgtgtgttgtcatctgggggcttccttttggatatgtcacgtttgatttttaatcaatgaggcagattggaagctgtctacttaacttccattcccattttcttctcttgaatatttttgagggtaaacaatatgaccaacctaaaataaacacatttcccagatttcctcaaggacagggtcagccatgtggcaggttctggccaatgagatgtaagcagaagctcttggaaaaatccttaaatgggggcctactcaaatggcacaggctatgggttcttcacccttcaggaaatctcaatcctattccatttccttcccatggaccttgaacaagttcttcagcatctgcatttctgggattgctggggagcatacataaagtaacattgtcaggaacaaaacaggtagccagtaagtggtgaagatggctgttttaatcattattccagataaataatgaaacccagttcttccaggaaaagggtagatgctgtatgtttaaaacttatttcccttagccctttcccagattcttttagttgccctgtacacatgatctgatgcaacattttcttataataaaggaaaccataagatcatcatagtgttccagtttctattgctgtataaaaaacacctagtggcataaaacagccatttgatcctgcttacagatcctgtgagtcaggaatttggacagggcacagtgggcacagattgtctctgctccacactattcacagccttagatgggaagactagagggttagatcaatggtccagatcatctgaaggcttgtttactaaatccgaaagcttgttactcagctgggctgggatgactcaaggaccggaagtgttcaccacagcctccccacctgggctgtcctcaagtgcctgggcttcctcacagtatggtggcctcagagtagccagactgctcacgcagtggctctgggctccaagtgcaagtgttgttactagcaagctggaagctgcgttgccttttatgacccaccctcaaaagtcccacagcatcacttctcccactctctctgttggagcagtcacagcaaccaccgagattcaaggggtggggaatagagaatccatctctcaaggcagagagtgtcagggtcatattgcgggacggtgtgtgggatagggacactgtcgtggccatctttagaaagtaaatctgccaccagtgaggtggggcatgaggtaaataggataaagcccagagtattcacaggctaagcactttgatcatcacagataaataactcgagtctaatatgcacaagagctagaacatattggacttggtttcagccagaaccagattcttcaaggacagtgcatgatttcctacatgcggcatcgtttatttatgagccaccgactctctctaaataaagtcagaggaggagccaaaaggggtttttagataatgagagttttaataagagtgcaacttaaatagattctttggctggtgctatgacagtatgtgaacaggacccctgactttaattaaccattttgccaggtgggcctcctttttaattagtacagaagatctaaacagattttttttccattttattatccaagaaagaaaaatgtaggatggctccatggcaatcttttggggttggaattaatttgattaagtgaaatcgttgccaaaatggtcaggcagtcacctaaatatagccaattgatcaagaatggagcccattgaacaatatttcgccagagaaattgaattactattcatacactagatatagcacagacaaatcttatcagacttttatagtgctcactaattggaatatttaagtcggaagatactgtagtaattcatgagctctttgagaggtaacctgacaaaaggaagaaaggggaccccaagtcgtctacataataaactaatttacagattccagtccacatgctttgttggcgtatataccatggaagaaagaaatttgtcacaacaaattctgccttggataccatcaaatttaaaattgtgtgttcatcatgagagctgggaacttgatttcttgaacaccaagtctgatgaatcctgtgtcttccatttggcatgaattccagaaccattttccaacctttgtcaaaatcataaaggacctcaaaaggataattatattcagggaaaaaaagaagaagaaaaaccacatcagaatcagtgactccatcaaaatcttaaatttaatatccaaatttttaaacaatttgctcgtatacttaaaataggggaagacaccagatataccctaccaaaccggaaggttgcaaaataatcgtcctgaccccagaaccctgcaccatgtgggcagggctgggaggtgccctacggcatcacttagtggagcagctttctatgagcaattgcagcaagagttctgggcttcactgggttatcctgttctgtcagcgactgtgaataggagtggcctgcactacaagggtaatttgtgtctgagaaacccctgtttgagtgaattgtatttaacatgaatacaacatattttgatgcactctcagttcccagatggacccctccagtgatgctaatgtggtgccaaatctccttcaaatggacactgctccttccaaagttaagatcagccatcagtgcaacctcctcatcgctttctctagtgtagctgcttctggactctaagccctcatttctgtaaggccctgtatgccaggattatgcggacaaaacttacagaggaggccaaaatatgataatgcagtctttacgtttaaaaataataccaaaaggtcgggcgcggtggctcacgcctgtaatcccagcactttgggaggccgaggcgggtggatcatgaggtcaggagatcgagaccatcctggctaacaaggtgaaaccccgtctctactaaaaatacaaaaaattagccgggcgcggtggctggcgcctgtagtcccagctactcgggaggctgaggcaggagaatggcgtgaacccgggaagcggagcttgcagtgagccgagattgcgccactgcagtccgcagtccggcctgggcgacagagcgagactccgtctcaaaaataataataataataataataataataataataataataccaaaaaatgcaacaagtccataacaaaaaaaatcactaaaagtgatgctgatgacagactctcaaggaacaggatgacatttaaggccacaaaacgctcagactctcactgctctcagcctgcagcctgcagggctcctcaaggacttgacaagtcaccaccaactaagtgactgtgaccctcgtcttgaggtgcacagcctcggccacgtacatggaatccaagtcagccctcctaaacacaaagaagtccttgtaagctgaaggtgggggatttagtgagactcttggcaaagtcaagatttgttaaccacatgggtggatctcaaggtgtgcccccttgacacctgggctccctttcttaatcacttccaacaatgaaacctaaaaggaggaggaggcctggggaagcctggcagataaaactgtgccagagtctgtggtgcgtcctctcccagacagcagccttactgccgtggtgcaggagccacccctcctcagaactcgcctgcagttttccagctttttcaccaatcatcccttactgtgacggggacatgtacccctgggttcagaagccaaacctaaagctgctgtttccaaactcaaatggtctttcaagtcttgtgtttaatttagaaatacacatggcggtcacattcttcactgtgtatatatctacatatattttaattctgaaatactgctgaatatcctgggccatcaggtaaagttgacaccaggggttattctgtgaggtcatgcgcccccacccccaccccatgcaatggtgtgagtcattgctcagaccacgaagtcaggacttgaggaaacacacgggaatgagcaaagcccatgtggcatccaggcctagagagatgcctgtggcaggagctgagggcaagggatgagcagaggagaccaggcccctgcagccagaggctcagtcctggctttttccaaactcttctccagaggagcccgcccttgcacaccaacgcctgcatgcttccctccttccttccttccttccctcctttccttccttctttcttttcttcctccctcccttccttcccttccttcccttccttccctccttttcttccttctttccttccttccttccctccctccttcccttccttccttccttcctccctccctccctccttccctccttcattccttccttccctcctttccttccttcacctccttcccttctctcctcccttcatcccttccttcctttcttccttccctccctcttccttcctttcttcacccctcccccttccctcatcccttccctccttcccttccttccttccttccctccttccttcccttccttccttccttgcttccttccttctttcctttcttcatccctccttccctccctccctccttcctgccttccttctttctttcttttctttcttcctccctccctccttccttccctccttcctgccttccttccttcctttctttttcctccctccctccttccttctttactcccttccttccttccttcctcccctcactcaatttgttcatcaaaaaatctagttccttgccatgccacagcctgagtatttaaaaataacttttcctcattttagaagtaatgatcattttttaaaaattagaagctgcagatagtcaaataactgtaaggataaacaataaaaatgacccagtctcccaaccacagaaagtgaccgttaacattttgtgaaaatgttgatacaaaacaaatgaaatgatactgtgcatttttgtaaactacttctaaagcataaaatgtactgtgaatatatctccctgttatgaaatatattttaacactaatttttttgaatacattgtcccccattgtcggtgggccattgttttttggataacatcttaataagtttggattttttaagcactttgttatggtggtagatttcccgtctatccatccatttctataaacaaaggaccatttcctctcccttgaagcaccatcccccaaccccacttgctcctccctcacccccaaatgcccaatctctcacacacgcacctgggggtggcccaggactcacctgtcatgcctcctgtatatctcaccttgtaactttacagttggctgagtccccccagagggctttgccatgtgataccccaacacccaccagttgcctgtattgatgtaaaagttaaaccgtgtgtccttttgtttagacaaaatccccaggtgatgtccaggactaagtaaatgtttgggatccaggcagttcaaattgccttggatttctaaatgccacattcaagctcagaagagaagcttaaatctatatgcactcaaagaacatttattgagcgttgctgtgtactaaggtcagagtctaaggccaaagtgaaggttcagtcaccccccacaaaactcatgtttgtctacagaagcttcccactgcctgagccagtggggagccatccacggctgaaatagaagaagtcactgtggcatggaattggagcagcatctacccttgtcacttgggctgatgtggcaattggaggtggtttctacagggcagaaagtcacaaatccacacttttaacaatttgtaaaccagaaaaccacctgcagaatgtgtatgtgcatctcccatagccttgaaccttcttcctgggaacagaccttttcaaatgactgaccttgcccaatccccgccatcaggcctggccttttacttctttcttttgttcaagtaatcttgaaaataactgaaattatttctgatcagttttgactaggaggtttttctcaaaacgatgctgtgaaagcaaagaaatttaacagtgttaaaacacctcagaggagagaataaacccagttccacttattagctgggtgtgcagtattaataaagggttggttgtaacctagcaactagtttagaaacacagaacaaggcaatcacagttttaaatatccttgtagtccctgagtccaagtatgtggtttctgacacactgtcaccttctgccgagtttagtcaatatctattactgttatttgcaaagagggataagatataacctgtctgttatatttgaaaaataaattgctatgataaagttcccaaaatccaggaatgtttctaatgttgtttttcttgtccacatccctcctccagggtttagaactagtaaccggcagtgcgaaaaatgggacttacttccgaattcatattaacaagtataaaatggtggaaaccatcacgtgcctttctagggagcccttccccgcctccaactacatccgcttgtttggccagcacgagcaactcctcaacaacctgtgtgctcggtacgatgaaaacctgatcacagatctctataggtgagttggacattgcatttgactacagggaaatacaaatatatatataatgtctgtgaatgagggacatgtgttgtgatgcacccgagagcaaaacgggaatcccagagagaggctgtgtggcagagatttcgttctaatgaagaacacctgacgctaatgtgggctggggagcagagagtcacaggatgtgtccacacctggcccccatggccacaccagggcctggaccccaggtgcaaccaagcctaccatggacgggcttggaggagatgatattcaagtccctttccacacggggctgctaagagcagtggtcagaaatgtaggaggtcaatttgggaacagcatgaggaagggtctgatcctgatgggactccgcgatcatgggacggggtgtttgtgaccccagccttcctcctcatggcatgtgttcaggcaggcccagggtggtcatttgtccagcgttttggtaagggaattcccacactgacaggtcggttagacttgaaacctttgtcttttcaaactcttaagacacacttcatcctatccattaggaaggcatagaatttccaagtggaaagttacttctgaatgtagcttgctgcttagcaaagttaggagactttccctattcacaaagcaaggtgatgcagacccagcaccagagacagatgtggaatgaaaaccatgcagttccagtgttctcgacacccacagaagcaactgccaggattgccatcaatctctcttgcctcttaaaaattttttaaattgtagaatgcatcatacaaacaaaaaagtatgtgaaatatgtatggacacttaaaagtactggaaatctatgggcccactgcctatgttaagaaataattccttaacttagcagtcaggaagtccctctctgatcacagccctccctcatcttcgtggaggtagccactgtcctgaagtttgagtttgtcattctgttgcctataaagcaaggatcagtgaacttcttctataaggggcagatatagcctcagttgcaagtactcatcccagcccttgcagtgagaaagaagccgtagatgatgtgtaaacaaaaagacacagctatatcccaagaaagcctcattcaccaaaatgggcattgggctggatttgcccccagtcatagtttgtcagtccttgttttaaagatgtgtacttagacacatgtgatttcctaaataatatattaatttgccttgcctacttctgactcaggtttatggcttaccaaagaaagcgagcattctgtttagcacggtgtttgtgagaaccatccaggatgatgtctgtagctgtggttcgtttgttctccctgctgtgtggtattccatcatataatggtcatgattcagtcatggcttttcctgttgactgtatttacactggttccagttcagggccattacaatcggacgttgtgaacactgtggacgtacttcatgtgcagaatctctctaagatatcctagccctagaaccgctgggtcacggaacatgcacgtcttcaactttactagttgatgcccaaatgtttcccaagtatggtcacgtgccacataaacacgttccagtcaacaatgggtcacacatataatcggagtcccataagatattaatgaagctgaaaaatttccatctccaagggccacattcctgtcacctagcacaacacatgactcacgtgtttgtggtgatgctgggtcaacaaacctactgtgctgcccagttggtataaaagcatagcacacagttatgtccagtgcagaacacttgctgatgataataaatgaccatgttactgtcttatgtatttactatactatacattttatcattattttcgagtgtatgccttctacttatgaaaaaaaagttaactctaaaacagtctcagataggtcctttgggggtattcagaaggcattattatcacaggagatggcagctccacgtgtgttattgcctctgaagcccttccagtgggacaagatgcagaggtggaagacagtgatattgatgatcctgaccctgcaggcctaggctaatgtgtgtgtttgtgcctcggtttgtaacagaaagtttaaacagtaaaaagtaaaataaaataatttgtaaataaggacatagatgaatatttgtgtatagctatacaatgtgcttatggggttcttttgttttttttgtttttttttttttttgagatggagtctcactctgttgcccaggctggagtatagtggcatgagctcggctcactgaagcctctgcctccctgggttcaagcaattctcctaccttagcctcccaagtaggtgggattacaggcacgtgctaccacacccagcttatttttgcatttttagtagagacggggtttcaccatgttggccaggctggtctcgaattaccaacctcaggtgatccacccgcctccgcctcccaaaatgctgggattacaggcatgagccaccgtgcctggccttgtgcttgtgttttaagctaaatgttattattacaaaagagtcaaaaagttgaaacaaaataagattataaagtaaaaagagtaagcacaggttaacttattattaaagaataataaagattgagaaacatgtttttataaatttagtgtagactaagtatactgtttataatatcttcggtattgtatgataatgtccgaggccttcgcacccactcaccactagctcactaactgccctagagcaacttccagtcctgtaagctccattcacggtaagtaccctatacaggtataccctttttaaatcttttatgccatatttttactgtaccttttctatgtttagatacaccaacacttagtatggagttacaattgcctacagtattcagtatagaaacctgtacaagtttgtaacctaggagcaacaggggcatataggccaggtgtgtagtagtagactagactatctaggtttgtgtaagtgcactctaggatggttgccaacaacgtgtttctcaggacctattcccatcgttaagtgacacatgactgtcgttatttatttaaatttcccccagcagtgaatgagagagctcctcttgctccacagacctgccaagccttggtactgttagacttttaaatttggccagtctagtggcatacaaaggtatcctcctagggctttaatgtgcttttccccacttaatgatgccttttcatttgttcatgggccatttgtggcagtttctgtgaaatgccaattcatgatatttgtccacggagcagggctgtcttctcattactaattcacagaagttatttataaacaaactggacacaaacttgtgttggttatatatttttaaccaactttgaggcttatctttttactttctttatgatgtcaacaatattcttaatttaatagaatgtttgtcttcttcaagagggtcttgggtatttttgtcctttcattcttctaatagttttataatcaacttgtcaagatccatgaaaaccccattggatttgataggaaatgcattaaatcttagatcaattaggcaagaattgacatatttgatattgagtccaatatcataacatagtatagctctcaatttaggtattctttaatgtctttcaataaaggtttatcattttatccatgaatggcttgcacaacttttgtttgatatgatccaagatgctttatattattttttctgttttaaatgtcattttttatgaattgatgcttgtgtatacagatgaactaattttagtatggttctgtattctgaaagttttgaataatttacctgtagatttttagattttccgagtagaaaaattatatcatctgcaaatagtgacagctttgtttcttcttttccaacttttatactgtttatttccttttcttgccttactgcactggctaagatttgtaataaaaagattggctgggtgaggtggctcacccatgtaatcccagcactttgggaggccgaggcgggcagatcacctaaaattgggagttcaggaccagcctggccaacatggggaaaacgcatctctactaaaaatacgaaaattaactgggtgtggtggctcacacttgtaatcctggctctttgaaaggctgaggcacgagaatcacttgaacctgagaggcggaggttgcagtgagctgagatggctccactgcactccagcctgggcgacagagtgagactgtgtctcaaaaataaaaataaaaagttaagtaggggtagtgaggggtagtgcccttgccccattcttaatttgaaagggaaagtgttcaaaattaagtgtgtaatagttgccatatgtatatttttatagatgtcctttatcagattaagaaagttccttttgattactggttttctaagcattcttaccatgaatggatttttatttttatttttcggaaagagtacttagtccctgaaaccttttatgtgtaaggatgtcttcctaatgctttcaaatataaactacgttttggtaagtgtcaaaatttaaaatcatgagctttccctcctcaaatctttgtaggcttggctccaatacttattttaaataatgaaaactgcaagtatttaaaaaatgaattcatttgctccttcacttatatataggattttcttggtcaaccttacccaaaatatttgagttaagggagaattagctgtttgttacagaaagattttggttggtggggaatgatatgctaagactttccggaaaaaaaatgttttcacatttgaccatattcagggccctacctggtttgtttctccctaaatagaaggtgattctgaaacagactcggtgagtttgagactactacagggagtgccgctgttaactgatgagagtaataatttcaaaagttaatttgatttgtgatgagtgtttgggatggcaagacggggtgacactggctatcaggaggtgccgatggacatctgtcagaaaggagcagggacaggaagatggccgccagtcatttctaagtgaggtcctgagagcaccgctgtgccttgtcagttactccaggcgtgtgttagtgggtacatgcagctgcgaccacattcttttcaagtgccacgaaatgctgccaggtcctagtgctaatttttgcgccagcactcctgccctgtctgttgtcagactggctggcgaggctctttccaagcagggtgaatggttgagctgattttggccgcgatatgattaccgattgatttcctgaccttggcagcatcagcaacgtccctcgttcagaccaggcacgtttcatttgcgcacttccatccaccacgtctggggcacctacctcagtgcccgctgctgccgggagggctgacagttaaccagctgcattgttgttctgcaagtcaggcatgacttcagtatcagttcctctccgcattcagagaaatcctttggatccttcctctccacttccccctatctattctcactccatcgagggccaaaacagcgcaggcactagctgtgccaatgggaacggtggcagccctgcgggtcagatgttgctgtggtagccgaggcctcccaggcagaccctggctgcctgcaaggggctcacttggaaccatatggggacacgaggtggcggccgagctgtcagccgccatgatgcacaggcagacagctgtcacgggaccacagtaagcgaagtgtctgcggcccaggctggcttggattccacctatattttattctctgtttttacctctgagtaccagtacaaaccattggcactgaagagagagacagaactaatccaccatcggtgactgtgtgtgtgtgtgtgtgtgtgtgtgtgtgtgagagagagagagagagagagagagaatttgatcaatggattgatttactactttggaaaaagaatagagccaattttatatcgtttgttgctttctgaaccaaccagcatttaaagtcacacaaatatgttactaaaaatcttcctttccccaatcttccccttaaaagcatttgtgcccccacaggcctcgctcatgcacacctcactcacacgtgtgcacacactcatgcacactcacacggcactcacaatgtacactcactcacacgcccagtcacacgctcacacacacctgcacccgcctctccaaaacctcacagtgcccccgcctgccaactcccttggcagtatttagaatggcagcaccttctgccctgctgaaaatgctcctcccttcaggacaccgggcgcgaaaggaccttcagtgagggtgtggagaagtggggaaatgggagctgtgggtggagaggagaggggaggctgaggcggcttcttgagatgccgcctgtcaggtacccgaacacccctgtcccgtgtcttctcggctttcctgactccactccatcgtctttcacccccacttatcgatgaccctgcaaaagagaggtctcgcctacagaatctctcccttcttcaccttaattagcagtctgtgcatcctttatcctcgtggtgtaaataggtcttgccctagcttctttgtatgagcccatcagatactcataaaccttgattaaacctcttttcacatcttaacatgctcagctctcaaagactgccctcagacagcccggccctcgcgcccgcgccaccaccgcctccacacttccccgcacacgccggtggcctacatttactggctgagtgttgctgtgcacagtgttctaaatgggatttgagcagccctttacaaggctgccattaccattttgaactgtgaggctccagaagttcttccctcaggaaagccaccttgtgttatctgtctttggaactgcaaagcaggatgctgccagcccacgtggccccctaatttattgatttgactcccgttggaataatttaatcatgactttaaaatgtttttctgcgcctctgtagtcagcagccttttgctgtgttcagtggtaaattgcatactacattccaggtgcctgtttttccggatttatcaaaatcttcttgaatgatgactgcccactccagcttctcaattttttggtccatacctaaaaggtggtggatggtaattctcccaatatccgcctcatccctcacacgcttccctgcggccgtgtgccaggccactgacctgctctctgtagactctgtaagggttcctgctcctctgtttcacttcagatcgtgccagtcctgtgcgaccagcctcgcaaagaatcctttcccaaatgatttgctaaaaatcaaaatccattctcttccttttgcttcccactcattcaattacaggctatttatctgccctcataaaaggcaatcgaggtcagtttgctcacgtactctggggattcctcattgaccatgccttggccttcttactccaacaggcagatccttacctagagatgtttctgctactattccagaggccacgaggccaaactcaaatttttgaaccttacttgttcccaagatggtcaactttagatctggaagtgtagaccaaggaggaggcgaaagtccactggacacaatatgtgtctgttcttattggcgatcctattctgatgaaaactaggggtcttttttagcatatgtcacctcccacctctttccactatggcatttgtgtggaagtaacctttcctggggtaaaaggtgagaccatgtttgaactgccctgaaattacagccagcacatgtctgttttcagatattcatgccaaagatgatagtgtggaagaaaaacagactcacccatttgcatagtccaaaatgaatgttcagagaaatgaacacatggagttctgcaagaagtatgaactttgaaacatttacctcatttaccatgaaaatatcacttggcatatcatgttagttaggacttactagaaaggctcggattgagattttttatggttttgaggtatcaggaatgtataaattctgatttcaagtgcctcagtctcactagtgttagtaagaatctttgcctgaaggatagtgcccgtcaatgaatgaaagaaacatgagtatccccctctaacaggcaagattttgttttatgtttaaggcttttattaatgagaatgtaagaaatgagggaggaaattgagccccagttaacatcaatctgaagttggggtgagggtgggagcccatgtctattaacaggtaactctccaccaggattccccccacccactgagtcaacgtgcactcccacagtccttacgttgccctttccaggcaggcagaggaaggcgctggcattctccctggctatacaagaaaactagtgctttcattatttgaaaggaaatgtgtatatttaaatcacatattaatactaaggggagacaatttcagcacagggatggccctgcatcccagaagaccgtgctgaaatgtgaaccgtacatgaaacaaatcatatagtgtgagacacaatttgcacacgtctgttgactcatatctgcaatattacgaataaaaactgaactcttcaccaagctttacaaaaacaaagaaataccttatggtgagcccaccactgccacctctcagttatccatagcccccgcccttgtcttcttagctgccaccccgaccaccctctttgtcctgtgcccctgtgcacacttggtatatatcctaagagaatttagtttgaaactcctacagtctgtaaaagcaaatcatcacttccctttccttaacatggaaaggacactagactaagaccaacagaggggtcaaattcctgcgttcttgcttatcagctttgtgaacttgaagaagccatttaatctcattgagcatcagtttcctcacccataaaatggagatgtaatccatgataaatcttcccacatcatgggatagaagtatatgttgatggacagtaaagtacaagtgcaaaaagttttttaaaagtatgtaaagtactatacaagggcagagctttgtaatgactttagctcgtgtgttcctgttcgctacacatcaatattatcctttatggagagacagaaacacttccagccttctatacagtattccctccccctcccaaattaatacaaatttaagaaaatgcagtgcttcttttaataatttaaatgagcagatgttttaaaattgcattcgtgtatgtgcttgctatatcttatttttaaaattgtatgggattacatatgatattgaatatgcttgttttcagagtcatgctctaagaaaaaaatttatttagagagaggtcattatcaataattaaataagtgagaaatctggtgctttacttagaataaatgtactaagatgagagtcgataatgtacctcccagggcactttatagaaaagggatggatcagatgcttccatataagtttcacttaaaaatgatttcatttccaaccactgggcacccaaagcagccaaatacattcttaatatcatttaaaatgtaaaattatgagctgtttgagttgtaaagtgtgtctagaatctaatgtcatatagttttaaaagttgctttggaacattgtttcatgcattgtcgataatcactaatactctagacctgcactgtccactatgagagtcaactgccccacgtgacaagtggcgaccatatcagacagcggagaatagagcatttccattgttgtggaaagctgtgttggacagtgctgctgtaggccagttgcatccatggaatttggagtgggcgtgttggatgtagcatctatgaacagtcgttccctaaaatgctaattgccagccccatttggatccgacattctgacctgccgatgtagctatcagatgcgtgctcagtgaaggcccagtggagacagaggaagtgatttctctctgtgcctgttttggtggggtcaattagaaaacattctctccagatcatgtgccaaaggtgtacagatggggaagggggctggtgtgggggaagggggctggtgtgggggaaggggcggagcaggtaagctttctggggcacttggtcactctgcaggccttgcaagggacactcggccttgctgggtgagataaaaattctgtcttgccctatgcttatacttgtttcaagctcagctggccaaccccaggcagcctggcacttccctgccagagttatgaagacaaccttgattactaacatactgtcttgttgtcagagcccaagtcttgatttggggtttaggaatgctgactggtaggttcagaactgacttccatccctctgcacatcttcgtaaaatcgctgttcttttcaaacttgtacagcaggagttaaagtcctttatagattttcttcctccatttcattacatacccatctggcagcatgtggttgaaggttattacttatgagtttaaaataatagctgatgagccgtggttatctttaaggctactaagctgctttaatataaatacctctttgccgaactccaagaaacaacggagttgttttactgttgttggaactgtgaaaataaatgcatttcagaaatcatgttctcattctactgagccacgagaaggaactggcctgcctgcctaaattttttatggcaaactaacaattgcaaagagacgctttgaagccacctgggcagtagggattcacaggtgcagcattctccttctttccctcctacacctgagtctttataggtttctttttgagggttatttaagcatatttgtttaatttttaaaaatttccactccaaaagcaatatgtgtttattacagaaaatgcagaaaaatatttcaaaagccgagtagaatataaaatctatacctaatcccaccacccagaacctattttagatgattgcactatgaaatgaaaagaattgaaggggaactgcgatttcctcctagaaataagacctgcagcaagcttgcagacagcacagctctccttcctgggtgccaggcagaccctaactgcagccccgcacacctgtctcgtacaggtgaggcaagggagaaccagagtggccgggctttccacgtgccacaaccaagacagtggcaccaataggaccagaaccagagtttcctgactttctgtcaagtttccttcatacaggacaaataggagtaggtttgccatcatgcaatgaccattctttagtaaaagcagttgttgtgtttgactcatcatttacctattataagaagattggccaaaaaaaaaattatgtttgggacaggagaataattttgctctctgataaaatacctcagaagatgcccaggataattcatgtgtggaggaagaaaatattagaacttctgtttataattttatctttaaaaaaaaaacagaaatcatgttttattagtattcaaagcacacgcatgggtgccctcttgggtcagatggaagacagctgtgcattctacatggcctcaacacaccataatgggacagtgtcacagcttggaggggtcaaccttattaattaactttgtttttgtttttgttttttgagatggagtctcgctctgtcacccaggctggagcacaatgacacaatctcagctcactgcaacctccacctccctggttcaagtgattctcctgcctcagtctcctgagtagctgggtagcaggcatgtgctaccacaccctgctaatttttgtatttttagtagagacggggtttcaccatgttgcccagactggtctcaaactcctgatctcagatgatccacctgcctcagcctcccagagtgctgggactaccaccacacccagcccttattagttaactttggaacctactgcagcttttgtgtatctggttctggttttaactaaactaaccctccacaaaattgacatgagcatttaacggattgttcaaaagaaactacagaatgcaaagcctggcaaagcagacacacatgaaccaggaaagggcagggccagatcatctcctcttcctcagccacactgtaagtaccatggttcgtctctcagctaaggttccactgcagacagcagaatcctctctagctggtttaaacagaaagcaatatactgccagttatgggtgctttatacaattccttcaatgggctggaggagcaggctttagactgccttccacgaaaaattcagaaaatggctccgcagacctagccaatctctgccacagtgaggaatttgtggaactgagaaactgccacaaaagttgccagctccatgaccaatcctctctggcaaaatccacaccagcaaaatgggtacactaagccctgatttctgcccccttctgctacagctgacaccaaatactgccacagccaggcttgccagcaaaagcaagaaatgcagtggaagcacctcctcagggtgttccatggagtgagggagagtccctcctcagggtgttttatagagtggaggcagaatctccacctcatggtgttcatgtccatcgtccacgtcctgcacagggctgtctctttggatgaaactcagtcccatgtagaacctacactggacatgagtctggaaattgtagtctttcccttcccggcctgtgatattttggctaaatcatgctacacagtatcttgagtgtggctggctgaaacagtctacagtatctctcatagctaactaatcaaccttgaccagaagtcagcccccacaaaatgcaaaactatcaagaagactctggagtttgtatttatatctactaccagtgaggatgatggttctaataatatacaggtccacaaaacccttatccaaaatcctaggagcagatgttgtggaattctataacttttttcaaattttgggaggaaccagacttaccctcccacatgaaacaactaaatagctgccaaaatgtaagaaacaaatttttaaaaaagatattagacatcaggcaatgaaggactgtgatctttgagagatgggaaacaaagaaggtgaaccctgtggttgatccagctgacggccttgagagagttcccaggccacagcaaggggaagcagagcccatgcagagtcctgagtggaggagagggagccgagagtccggggagaccaaggcaggtggagttgtcaggacagagggagagggagctgagggtccggggagaccaaggcaggtggagttgtcaggacagagtactggagaggagaaggttgcacagagagagaagcttggagatgtgcagaagcctcccctgggagcattcagttgagtactggtcagtccatgtgggcaaggaaactgcccaagacaggggaaagaaccactctaaaggattagaaaaagcatgacagtgtctaatactcacacaaggctgggaacgctgcctgttcccaccagccagacttgagaactttaagattaatgaggcaataggtagggtacacaaaagggactcatctcagtagcagggaataattagtcctaaaccaaacattgctgcagtccgacttaataaatcttgaaagcaagacatgaatgtatcaaatgctttccaagtaacttatctacatctgaaaacaagtttaagagtgtttataggaatactgaaaatttccacacctaacaaaatgatacaatttctgatacctaatcaaaaaattactgagaaggcaaagaaacaagaaaatacaacccataatgaggagaaaaatcaatcaacaaaaccaacccagaactgactcagatgttagaattagcagacaagtatgttgaaacagctattataactgttactataactgcattccatgtgattaaaaagttaagatgtggaaaacacataaaagacccaaatcaaacttttagagatgaaaactacaatgtctgagacaagaactaccctggatgggcttagttgcagattagacctcgctgggaaaagggtaagtgaacttgaagacataacaattgaaactgcccaaaataaaacacacagaggaaaaagaatataaaaccatgaacagggtatcagtgaggaatgggacaacttcaagtggcctaaagaaataacgaccaaaatttttccaaatttgatgaaaactcacaaatctgagaagctcagtgaatctcaagcataaaaaaaaatgaagaaaactatgccaaggcatatcataatcaaactactcaaaacccacaataaagagaaagtcttaaaagcaacaaaagacacgggcacattctttacagacgaataagatgaaaatgacaacagatttctcatcagaagcaatgcaagccagaaaacagtggagcaacattgttaaagtaccattattttttcaaattttagaatgcattgattatatattatgtaacagctccggactaataaacatggcatacccccccatattacatacaccatcctacccatgccaaccaacatttcttgagttattctgtatctcattatttaactatttaatttctctattgccttactgtcttccaactgatagccttgcgtatagccccaatgctgtggactgaattatgtcctctcaccaaatgtatatgttgaagctctaaccccctatgtgactgtatctggacatacagtctttagaaggtaattaagatttaatgagatcataaggatgggactcttaggagagaaagagacagatgtcactctctctctgtctctgattctctctctatctctctctctgtcatgtgaggacacagcaggaaggtggccatctacaaactagaaagagagccctcaccagaacctaactatgttatcaccttgatcttggactttcagcctccagaagagtgagaaatacatttctgttgtttaagccacccaatctatagcattttgttatgtcagcctgagcaggctaagagatttacaccccaagtttgttgcttctttatatccccgcaattcagtaggctgcggtgtaggcaaacagagggtgttttgctctttccaatggcagatggtcattctgtccaaggcccatggtacccactggacacgtctgtgtagcagtgatgggaatggcatccatgtcagaacctggatccagtcccgggttctaacattataccagccttaagttcattctctaggcataaaggtagtgtcctcattctcaccaaaccgagtaacatgagtgaaaatgagagagcacctcgtgggtgtcttagtctgttttgtgttgctgtagtagaatacctgagactggggaatttgtaaagacgaggtttattgagctcacagttctgcaagctggggagttcaacagtggcatgaccctggcttctggtgagagcttctctgctacgtcataacatggtggggaaggtcaaaggggaaatggagacctgcaaagacagtgccaaggggcactctggctttaaaacaaactgatcctgagggaatgaatccactcccgtgagaaccaattcagtttctccagagcaagtactcactcactaccatgagaatggcaccagctattcatgaggcatctgcccccactacccaaatacttcccactgggccccacctcccaacactgccacattagggatcaaatttcaacatgagagcgagtgcagtggctcgtgcctataattccagcactttgggagactcagcagggaggatcacttgagcccaggcattcaagaggagcctgggcaacatagtgagaccccatctctacaaaaaaaaaaaaaaaaaaaattagcagggtgtcttggtgcatgcatgtactcctagctactttagtggctgaggtgagaggatcactcaaacctgggaggcagaggctgcattgagccaagattgcaccactgcactccccagcctgggtgacagagtgagaccccatctcaaaaaaaaaaaaaaaaaatcaacatgagttttgttggggaaaaagaaaccataaaccatagcagtgggggtccttcaaaccttgctgagtgatgctttcttatacaagccttggtttttgtttttttttattattattatttattttttttattattattatactttaagttttagggtacatgtgcacaatgtgcaggttagttacatatgtatacatgtgccatgctggtgggctgcacccactaactcgtcatctagcattaggtatatctcccaatgctatccctcccccacccccccaccccacaacagtccccagagtgtgatgttccccttcctgtgtccatgtgttctcattgttcaattcccacctatgagtgagaatatgcggtgtttggttttttgttcttgcgatagtttactgagaatgatgatttccaatttcatccatgtccctacaaaggacatgaactcatcgttttttatggctgcatagtattccatggtgtatatgtgccacattttcttaatccagtctatcattgttggacatttgggttggttccaagtctttgctattgtgaataatgctgcaataaacatatgtgtgcatgtgtccttatagcagcatgatttatagtcctttgggtatatacccagtaatgggatggctgggtcaaatggtatttctagttctagatccctgaggaatcaccacactgacttccacaaggattgaactagtttacagtcccaccaacagtgtaaaagtgttcctatttctccacatcctctccagcacctgttatttcctgactttttaatgactgccattctaactggtgtgagatggtatctcattgtggttttgatttgcatttctctgatggccagtgatggtgagcattttttcatgtgttttttggctgcataaatgtcttcttttgagaagtgtctgttcatatccttcgcccactttttgatggggttgtttgtttttttcttgtaaatttgtttgagttcattgtagatgctggatattagccctttgtcagatgagtaggttgcgaaaattttctcgcattgtgtaggttgcctgttcactctgatggtagtttcttttgctgtgcagaagctcttgagtttaattagatcccatttgtcaattttggcttttgttgccattgcttttggtgttttagacatgaagtccttgcccatgcctatgtcctgaatggtaatgcctaggttttcttctagggtttttatggttttaggtctaacgtttaagtctttaatccatcttgaattaatgtttgtataaggtgtaaggaagggatccagtttcagctttctacatatggctagccagttttcccagcaccatttattaaatagggaatcctttccccattgcttgtttttctcaggtttgtgaaagatcagatagttgtagatacatggcgttatttctgagggctctgttctgttccattgatctggatctctgttttggtaccagtaccatgctgttttggttactgtagccttgtagtatagtttgaagtcaggtagtgtgattcctccagctttgttcttttggctcaggattgacttggcgatgcgggctctttttttggttccatatgaactttaaagtagttttttccaattctgtgaagaaagtcattggtagcttgatggggatggcattgaatctgtaaattaccttgggcagtatggccattttcacgatattgattcttcctacccatgagcatggaatgttcttccatttgtttgtatcctcatttatttccttgagcagtggtttgtagttctccttgaagaggtctttcacatcccttgtaagttggattcctaggtattttattctctttgaagcaattgtgaatgggagttcactcatgatttggctctctgtttgtctgttgttggtatataagaatgcttgtgatttttgtacattgattttgtatcctgagactttgctgaagttgcttatcagcttaaggagattttgggctgagacaatggggttttctagatatacagtcatgtcatctgcaaacagggacaatttgacttcctcttttcctaattgaataccctttatttccttcccctgcctaattgccctggccagaacttccaacactatgttgaataggagtggtgagagagggcatccctgtcttgtgccagttttcaaagggaatgcttccagttttttcccattcagtatgatattggctatgggtttgtcatagatagctcttattattttgaaatacgtcccatcaatacctaatttattgagagtttttagcatgaagggttgcctgtaatcccagctactcgggaggctgaggcatgataatcgcttgaacccaggaggcagagtttgcagtgagccaagatcgtgccactgcactccagcctggatgacagagtgagactctgtctgaaaaaaaccaaggcagacagagtctcactctgtcatccaggctggagtgcagtggcacgatcttggctcactgcaacctctgcctcctgggttcaagcgattatcatgcctcagcttcccgagtagctgggattacaggcttgagccagcatgcccggctaatttttgtatttttagtagagatggggtttcactatgttggtcggactagtcttgaactcctgacctcaagtgatctgcctgcctcctcccaaagtgctgggattacaggcatgagccactgtgcctggcctcttatgcaagtctcttgattcctctaagccttgtttcccttatctgtaaaaggggccttataattattccctggggtgtctttgaaaactaaaggaggtgctgtacaggaagctttcagatctgaatcacccctggagggactgttccacagtccctgggctgcacagctcctctctctgccctgggattgcactgctgcaggccccaaacgtcttcaacctggcactgtgcgtgctgctcagcggtgtccccagcacacacccagacagctgtgcacagtgacagatggcagagccccagcatggcctcagccattttcacttctcttttaaagatactttttgtcaccttcttcgcaaaccttaagttgtgttttgtgacttattgttcactctatctagtaatttggggagaagagggcaccaaatgccaccaacgatgcccctgcagctgctaataggtgccactctttggatcccacggtaccctcttggccccagcggctctgacagctgctggggcactgtctgccaggccaggatacgtgctgaaggctctgagggcagaatagaacccagcgcagtcacgctgggatcccagagtttcacggcattaataatctatagttcaatcattaggagcaaatccaagtgaaataggaaagtgtacaccacgctggaggccgtgaggctgctgggagaaaggcttctctgctccttggcaggcttaatgattagttcccagccactagcagccccagctgacaaacggcgcctgcaagctgtaggctttctgcatgtgataattgacaaatgctggaagtcattcaggatattcacatggactggctaccagggatctgctgggcttttcaggcccccaactcaaaccctctcttgtaccaggaaggacgtcccttcttgggtcaatcgttgccctcaggacagatctgcaagtggatcttatgcagggtgcctccaaggctgctggagtcctggggaggatttgacacatgaacgaatgtgaccccactctctttttccaattatgtgttggattgaagtgccaacttaggcctgtattgcaacagctcaatctgcagcacactaagtaggaagagatctgaagcagagaagcatttttaatttcagagtttttaaaaaaatcattcatttcaagaggttattggataaagcatttttaaaaggttttatttatattcttcttggtcataagcattagtcaggaatcttgtctgcaagtgacagaagcccagctgaaaccagcggacactgggaggagactttcgtgtctcccacagctaaaccgaggagtgcagggctggcaccggaggcatgatttgaaacgccgttggccctttgtccctgcttccttctctgggattggcctcccctgatggtggaaatcatggggagtcccaggcttatgcatcttacagcttgctatttagaggatagagcaccctctcttgcctagtgccaccttgaaaagttcctggggaaggactccaaacagcctggctcccatgatgtgtctgcccacttagaccatcagcatggccatgtcccagccctgaggccagggggcaaggctgcttgggggtcaggagggatcctgggcagacaaaaagctttccttaaacatcagttacttactggatgtattcacagactttcagcctctctgggttccctgagtggttttggctcctccttccacttctggtattgcataaaatcctccaccacagttcataacatctggctcccaagaggccacatgatgcagggcagaaatgcagggtgtaattctctgtggataggaaggagccggagaagacaaaacccttgtctccgcctcccattggctgtcccaagaccctgattctctatacagcctgtcctaagttatccctcatggctgagtgagttctcctagcgtgaagcagtggcctgcccataatacatagttctgcattgctccccatcttccaggaataatgagaagctcctaaaagcttccagtgagtaaagcaggtcacttagaaaggaactagaatcaaactggtgtcagatttttgaatagcaacctcagaacctaagagataatgaggcaatgtcttcaaaagtctgaaaggaaataattccaaacaataattctattactgatatggtttggatttgtgtccccacccaaatctcatgttgaattgcaatccccattgttggaagaggggcctggtgggaggtgattgtttcatgggggcggattttccccttgctgttcttgtaatagtgagttctcatgagatgtggttgtttaaaagtgcgtagcacctccccttctctcttcctcctgctctggccatgtaagacatgcctgcttcccttcaaccatgactgaaagtttcctgaggcctccctagatatgcttcctgtatagcctgtgcaactgtgagccaattaaacctcttttctttgtaaattacccagtttctggtctttctttatagcagtgcaagaatggactaatacaattaccatccatcaagtaagaaccaatgggataggactattagtgctcataaatgaaggagaaatagtatgactagaatatcatcattttccagaaccccctagggaatcatggacatgggtatggagcatcagtggctgctgatatagaaaaggaggcagccagacctcatgcagtccttggtgggaaaacacaccacctgcgaaaaacaagccaaattgaacctgagtctgactaggactgttgatctaccaccaatatgtaggaaaccgagaggatagaggaacatgtaaaacatgtaaaacacagagctgaagtatattaaatacagagtgggaaactatgtgacaaacagcctgattccctcaacaaataaattgcaagaaataaaacttgcaatggaggggggcctatgaattagcatagtttttaaaaacatatcaccctatttggatcctgattcagataaactgttaaacaaaaatctgtgccatttatgaggtgattggaaatttgaaacctggagagttaatgatgataagcaattatgattaatttttttagcagtaaagatggtatttcagatatatagatatatatatattatatatatgtaatatatataatatatgtaatatatattatatatatgtaatatatataatatatgtaatatatgtaatatatattatatatgtaatataatatatgtaatatatattatatatgtaatatataatatatgtaatatataatatatgtaatatatattatatatgtaatatataatatatattatatatgtaatatatatatatttaaaaacagaaccattatcttttagagatacatactgaagtgtctggagacatgcttcaagataacccaggagggagaatggtagaaggaactagagatgacccaagactgcccttgagctaataactgttttaattgggtaatggatgatgggagctcattataggtatatttctaacttaaacataatttaaaattctcataataaggagttatttttgagaagcaaccaaagttgtaaactaagaaggagtaaggaaggggctgtggcactgaggggcaatgtagagaagtcccagctgccaagaggacagccaggtgggccaaagaggagaggagggaggggtcctggacacaattaattacttggattatttgaaatgtttacatggaaaataattttgaagggtgctttacagagctgctggaacagtttgaaaaaaattatactagatacattaaaaactaacaaaaatagggcagttattaattctaagaaaagttaaaagttatacaagaaaggcctgtgattaatattgcattgttaaaataatgtaatcacagaattcaaatttaaccaaaaaactgtgatacaaactatttgggaaattgggagagagagaagtgagggtttgtgttttaaaaagataaaacttcatttatcataacaaggtgtcaatagttatgcctaaagttaataaatgagagtgtctggtgattctcttcaaaataacctaggagggagaagagtaggaggagctagcaatgacacaacatgggccatgagtcgttaactgttgaaactgggtgataggtgatggtaacttatataagtaatcatatttatgtcaacaatcattcaaaaagtatctgataatctctgaattacttaacactctggttgcaagaaacagaaatcaaccaaagctatagatttaaggtaaaaaggagaatccattgtgaagtttcatggttgtatctaacaggacaaagggcagagataagactaggttttgggaaggaaccacagcaggacagacaaggtagggagagatcatgcagtggctgcttctttctcttgcagactggctttctctgcttcccccacagctcccatgtttacgttgcaagccccaaaacccatagaaattatccagatgtacgttggtcccaactccagtttccttggagagtgattgataggtatggcttggtgagacagtttcaaactatgactgcaaaccatttggccctcctcccagaaagagtgtaaggtgtatgtcccctgcccttgaacctgggcaagcttgtgattgcttgcttttaccaatagagtttggcagaagtgagaccatgtgacttctaggactggcttatagaaggccatgcagtgtccaacttgtttgctagaatattccctctgaatttcctggcctgacatataagaagtctaactatcctcagaccaccatgctgtgaggaagcccaagccacatggacaggccatacaggcactctagcaagtgtcccagctgagccaagccttcaagtcatcccaacccaggtgctagacatgtgagtgaagaagcttccagatggtttcagccacagtcatctgagtggcccccagtcactcattgttccatctgatacccctgtcatcatggagcagagccaagtgatcgtaagcataataaaatggctgttgctctatgctactgagttttggagtggttgttgcacattaatacataactgaaatgctcggatcaaatgacgttccctgtttcctgacatgaagtcccaacatgactgttgggggcctacccccacaaagagagagggatggcagggggttgagcggattccaacaaacctcaaggccttcactccatttctgagcctgatttcacagcagcctgttgcctatctgggtgcaggaaaggaggtatggactgagaactcttgacctcctgtatctaagcccccttctcaattcttgttctcccacatagtaagccagtgtaaaggaggaaagagggaagtggtatatatttgccgtggtaaatggtatcattaactcccttcccttccagtcccatggtggtcttccagcagaaacagttaccaagaaatgggaactaccctcagagttctggcatcttccttctgtggcctctcgagaacagaagagatcattagagggtcctcgtgttgcctagcaacctgtgaatgctgtttgctatcatgttattaatatggtaggaaagtgtttcatagaagacattcatcttgcattaatgaaaatcaaatttactaatatgacacaaaatctgttcttccttgtgactttctatacttaagtagcttatttattgaattagactgtgagtggtttccagggttgagactgttaaagttatcataataatgactttgttttcaataatgtcagatggcccttcatgatgagattatgcagctctgactttgtgatcactgttcttagacaaagcactgctgccctggggcctagccccatacctgtgagctactctgccactcgacttcaacttcttcccgccaaggctcagctaggcgaggattctagtttgagccagtatacctttaaagagggccccatggaataaacggatctcattcagcatgggcatgaaaggcactggagaagttattcagccttcgtcttcgatttttctaaaaaaggacaacaaacaaccctaaattttcaggccttcaaaagagagtaagaaatacagacagtcccctactttcaaacacaatttgttcctaaaagcaagtatggaattcaaatgcccagaaaccaaataatagacccatctcttaaaaaagagaattctcttcccaagagttaacatatgattgctgaaaatgttctttattatttttagcacgtgaaagtctcagttcagcagatagacagaagttgaagagtattgatggctaagatgtaaacagacaagttgtattaataacgaatggaatgcacagagccagtatccaaaagccaagggctgcacctagaggcacctagaaagaagccatgtaaaaacctaaactgcagagctaaatttctagaggtttttttaaataaagtcttgttttctatttataaaagtagtacatgatcattgcagagcccaacatgggggttgtggcgggggtatgaaataaagaattgcaaagaaaccaattgttaatttttttggtgtgtgtcctttcatatttttctctaaatatacaatgtatatataaacaatatttcacgtgctgatttgcagcttgctattttagcttctcagcatattctgaacatgttcccatttcttgagattctattttaatggcgttattttttaacgactggatagagttctaccataccaacgtgccttacttaattaactgggctgctcttaactttttgttttcataattaaccctgcaataaacattcttgatgatacatctttttggcgtatccttgattatttccattaaaattgttttaatattctcaattcttatgcattcaatgtatttttattgaacaatagtgtgctgcttacttgaaacacagccattgagacgtgccctcttccttcacagagcttaagattaagtaggaaagatagaaaattgtacatggctgttaaaaaaaaattaccaccacccaactgaacttttctccctccgctcagtcccactcctctggccaacactgaccgcagtctcagtttgtgaatatgtgtttctcaaatgggattatactgtacctatttccttctagttttttcacttaagaatctgtataaatattgaagttctttccatgtcagtacacatagttctcactctttttaatggcttttttatctttcatggaatagctaaatcccaatttacttaatgatttttctactaatgaacatttaggttattttcaagtttgtcctggcattgtatataatgttaccactgaacatatatctctgtgtgcatgaatgggatttctggatcagtgggtatatacatttacattttgatcaagatattattttaaattatcttcaaaaaaggttattcccactaacaggacagaagagagcttttttctccccatgctcatgaacactggatatattctgcaggaggaagaaagagtgggaagtgtatctctcattgtactttcaacttgcctctcttcagtgtccactgaatcttttcataggtttattagtcatttgtatttattcttctgtgaattgcgtgtcattctttgcccatttttaattaggttgcctgtttctttttcatttatgagaatttattatatttaaagactagtaatccttattatgtacattgcaaatattttacagcctgtctttaaaattaatagacatttttagggcagttctaggtttacagaagaaaatgatcagaaagtacagagttcctttaaggccaggagtttgagaccagcctgggcaacaaagcaagacctcctctctgtaagaagaaagtacagagctcccacataccctcctccacccccagccacttacacagtttctactattatttacatctttagtgtggtctatttgatacaactgatgaaacaatattgatacattattattaactaaagttcatagtttacattagggttcattcttgatgttgcacattctgttagtgttgacaaatgtatactgacatgtacccaccttacagtgtgaaacagaacgcctttccatgcctggaaatcctctgtgctgtgcctactcgtgccttcctcctgcctcccccacaagcttctggcaaccgctcattttattactgtctccgtagttttaccttttccagaatatcatatgttggaatcattcagtatgtatgtagtcctttcggactggcttttttcacttagtaatatgcttttaaggttcctccatgtctttttagcactgaataatattccattgtctggatataccacagtttgtttatctgttcacctactaaaatatatattggtggttccaagttttggcaattatgaataaaactgctgtaacatgtacaagtttttgtatgggcataagttttcaactcttttgggactataccaaggaacacaattttggatgatgtggtaagagtgtttagtttttgtaagaaaccaccgaactgtcttccaaagtagctatacaccattttgtatttccaccagcaatgaatgagagctcctgttgttccacatccatgtcagcatttggtgttgttaatgttttagattttagccatacccattgttgtttttaatttgaaattccctagtgacttaccatattgaccattttgggatcaataaatttaaaatgtatatatatttttaacaggtctcactaagttgtccatgctggtctcaaattcctgggctcaaaccatcctcctgtgtggctgggattacagggacatgctgtcatgcccaactcaaatgcttgcttgctatctctatgtcttctttggtgacgtgtccagctcttttgcccatttttaaatttggatgtctgttttcctactgttgaattttaagagctctttgtgtatttggtttactattcctttattggatatgtgttttgcaaagattttctcccagtttgtggcttgtctttttattcacttttattatttgtttttgatatctttttttataaaggttggaatttttacataatcaaaccgtctctaacaaagaagaataacaaaattcttctttttgaattctgtctcctacttaggaaattttctccacctggaaattgtaaaatatgctcctattttcttctatcactttcgtagctttgttttacattgacatctttaattcatctggaaaactgtgtgtgtgattgtgtgtggtgtaatataagaatttaattttactgtttccaagtgtagagataattttcccaacaactctttctaaataattcatgttttttcctatgtaattgaaatactaccattatcatacactgagccaaaatctttttctacagagaattcagtttctgaatttcctaccctgtttctttgctccattttgtctgtttctgtactcttccatgctgttgtaatgattgagacattataagttggcttgatatctttaatgtgtagtcttcttagctattctttccgaatgtattatcatgtccaactttataaaaattatttttggaattttaactgagtctgaattgaagttacaggttaatttggggtacatttataaaatggaatattaccattcaggtctttttaaattttcttccatgaactctgataggttttttttcatagagcttgcacatttatatttaagtttattttagtatttttatagttttgttgctgctgtagatggaatctttttgtttcattacattttctgattttaaaaaagatattggtagttgggaaagatgtgggttttgtatgttgctcttgtgttgaagtctcttttttgtttaagcatattttattagattatcttggaatttctttgacagatgattatcagttacaataacagcaccttttttctttcctctccaatacttctactttctatttatttttcttattttattgaattgcctggaattacatgtacaatattaaatggtagtggagatagtgcccacccttgtcctcttcttgccttttatgggaaagagacaatgaacaagtaattttttaaagagaaactaaatcaggaacttcgaaggccagtgcatatttcatgaattaggaacattaatgcaccttcttattatctttcttccctcagaaaaattaaactgaaatgtctctaaaaaatataaatgtaactcacattatgtaatatgtttccaaaatggctggcatgagctctcattttgattgtttaagagactctctttgggctaaggtcacatgtttgtatctttggactgccattaccttcagctttaggtaagagaaacattattttagttatgtttatgttatgacataatcaagatcttccccaagaggaagtggagctatctacccaatcctagagaaggtgatttcctggaagaaaagaaatgcattccagcctgggcaacagagcaagagcctgtcaaaaaaaaaaaaaaaaaaaaaaaaaaaacagaagaaacaggaggctttgaggtccctcaaagtccctatcacaggatttcttgcaaatctttcttcccagtagatcatatccatgagtaacatgaattgctgggtgatcactcataatgatgtcagcactcatctgccccgggtgagcacccacagtcttgggcgtcaacaccccttgctttcaggcactgctcttctctccagtcagaatccatgcggaagcgccagctgtggttgtgcaggctggtttcagtgctgcttcgctttgataagtaactaagtacaggatgtttgaggaataaaaagaaggccagcgtggctgtagcacagtgagagaaggtcagaagagctggatcatgtagatcatgtggaggtttggacttgggatcgttgtttcaaagcatgaagggtagcaacatgccaattcatgttttaaacattccccatatgctatatggggaatggagctgttagggagacacagccataccccaggtgagagatggtactttggatggtcatatttcagatgtattttagaggcagtgtgtgcaagacttgcttctaagctctggtgatatatacaactgcttacttgactctcaaacttaacaaggccaaactcctagaagaaaacaaagaggaacagctccttgacattggccttggccttgacttttgtgatatgaaaccaaaagcacaggcaacaaaagcaaaaataaacaagtgggtctacatcaaactaaaaagcttctgcacaacaaaggaaacaatttcaaaaaaaaaggcaacctatgaaatgagagaaagtatttgcaaaccatacttctgatagggggttaatatccaaaatatataatgaagtcatataactcaatagaaaaaataaataacccaattaaaagtgggccaaagacccaaatagacaatttttcaaagaagacatatagacggctgggaagtacatgaaaaggtgttagacgtgactacttaacggggaaatgcaaatcaaaatcggaatgagatgtcacctcgtacccgataggatggctgctctctgaaataacaggagctaacaagcgttgtcggggtgtggaggttgggcaccagcccaaatccggtctcaagatcctctcaactccttcttatcaagaaaccccttgggaccttactcttcctactgcagtcagctgaataaacctgactttgtttacacgccaggttcctggtggtttttggctggtaggaatcaaccttttgctccctctccctgtgttccttgtcatttcttctgctgacactttactcaagtgtccctcactgcccccctgatcccaccacccctcaggacatactgcgatttccctgggattgccatcaaccgtcttgtcatctcttccttgaaccaaacctgtctcttggggcccttatccagctccatctgtgctagggtcagtctggccaactggacattcccactttggacttctgcaggcacttctgtctccactttaaaaaaggaatggactcattccttgtcctttgcccctgttcacctctctgtcctgtgctcctgcttccctgcacctctgagccagggcctgggaatatctgcagatctttttccttcactcgcttctccctcacctcctaaatgtgtctccagtcatctgctgccattgcagctgcatttagcagggcccctttgcttccggccataccctgtccagtgtagcctcaacatggcttccagagcacctgttctgaaccataaataggatgtccacagcactcacttgtttaaagccttcccatggctttccatcacttgggagataaagtccaagccccatacacaagcatttagagtctgccccgcccactgccccccaccttgcatccgactggacgttagagcagtcaaaccacctgtcattcccagcaggccctgcctgctttgtgcctccacgctttcccgggcctggtttcccttgcaaacaccgactccttctccagtgcttcagtagatcctccccgtgcctctgtacgcagcgcctgtaagtgatggcggagctcccgcctgctctagtgcagccatcatcccacagtattgtaccgtattgtggttctctttacatgtccgtcatctcttgctgtcagagcacctctggatgctgggcccactgcacattcatccttgcatttgaaatgatgctcacaggaggcggtcaacagactcactttcttcacctttctatctagaccagtgatgtccagtagaaatataacagaagccacatacaaaattgtaccctttttagtggtcacattaaaaacataaaaagaaacagagaaaattaatttaataatatattatatttaacccaagatatccaaaactattgtcatttccacatttagtcaatacaaaaacagtaataagctattttacatttttgttgcattatcttcaaaattcagtgtgtattttatacaggaggtacatctcaattcagactagccgttttttgtttgtttgtttgttttgtgacagggtctcactctgtcacccagactggagtgcatggcgccatctcagctcactgcaacctctgcctcccaggctccagtgatcctcccacctcagtctcctgagtagttgggattacaggcatgtgacaccccacccagctaatttttgtatttttttgtagagacagggtttcaccatgttgcccaggctggtctcgaactcctgacctcaagtgatccgcctgcctcagccacccaaagtgctagtattaacaggtgtgagccaccacacctggcccagaccagccacattttaagtgctcagaagccgctggtggctcatggctcctggaccagaccatgggggcttcagcaggtgcagcggtgggcctctgttttcctacctgtagaacaagaaggttgccaaaatctgtaatctcttatccctcccagctctaaaaaaatggggctctgataccttgtgaggaattcaagagaatgtcctctctcagagtgaagtgtccttcaccagctggtgagctggatcccagcagttttgttaactgtgatcacttggttagaatggaggctgcaggtttcttcccctggaaagctgctactttgagattatttatacaggtatttttaccttcataactaattagtgatactttgagactatataaataccttatgtctcataatttcttctacaaattttagactccatggacaattcttggctgaaataactattactgcactgtttaccaaatggtgatttttctacttccataattcttacatatttattacttagcatcctactgtaaggaagaattgtcccttctcctccgtttatttactcattcattcatctttatcattgtggacttaaggattcctgcactcttctgtgggttgtaatccattaccctcttattgtgttttggtgagatatgaactaggaatatgttagttaaattttcatgcttgatttttggaaaccacaaccctgaaatcctaagagtgacaaaaaaaagtgaagaaacagtttgtggtttattattctctctgtaaaagctttagaaaaaaaaaaaaaggaacacattaattagaaaagcctatttgctgaaagagaattatttttaacatgtattcattatttatttttaaaattattttaaacacatttcaaacatggtgtgtgtgttctgtcctggtcaatgatatttctactgagcacttgttcagaatttaaagagccattactttaaccaaaggaataataagggagtgaaatatcttgctctatggagtttgctagttcttgcagcctcagcctcacaaaaggtcattctctcttgctcctttgtccccctgactcgtgggggtttatatgtgcacatatacacttttttttttcttttcctacagaaaatagataggaaatgggcatgattgtgagtgaggctgagtggccgcctggcctaatgctggcctgggctctctgcagcctaattaaaggaaaatggttgtgctctctatgaagagagaagcagaatgagagcagacaggcacaggaagggaagctgaagcactaagagcttccccttttctgcagaattaaatgctaaccttgcctcatactattagtgctgaacttatataacaaatcaatgtaaatagctggccaacttccagggcactagatttattgtgcaaattcaattagtgcagcccctaagaaaccagcaatgtgcaaacaaatactgtagatggactaaaagggaagaggcagagcactaagactcagtcctgtaccctgacggcagacattgctgtaaggcactgccaaacccagcttcccaccatggcaaagtgtgtgaatgacccgcggctgtgctttcaggataaacttaaatagaaacaaaattcttaagtgtctaaacattatgctatttctacaagaaaactggttcgctctggcaagtaagaccaaaagtcagacaggtcagaagaaaattcagcctgcttgggctttagaatgcctgggccttaattccggggccacttttcccaactgccatctcaatatgttcagtgaacaactggtttaactattttgatttacttggctcacccagtgtagtaagcaggcaaaacagcaaagaaataactccatttggacagtttgcatttaattttcatcaattcagacacaaaaaaagtaaggcctcagtttaacaatttccatgcaatttttatttgtttccacagaattcttttttaaattaaaaaaggtctcactttgttgcccaggcttgagttctgtggcatgatcatagctcactacagcctcaaactcgggctcaagtgatcctcctgcctctgcctcccaaatagctaggactacaggcacgcaccaccacgtccagctaatttttattttttaatttttgtagagacaagcgtctccctatgttgcccagactggtctcaagctcctgtcctcaatcctcccacttcagcttcccacagcactgagattacaggcatgagccaatgtacctggcccatttccacataattctttagtgaaagacaaaacttcaagaaagctagttacgatgtcctcttacctttattgctctataaaatggcaggcaaattaatttatgcagtactttcaaatggaggaaaagcattccctgaggagaaaaactgcagttatgccaaagaaagactttctttgaattaagcagcaaacaaaaaagtattttaatattttagtttctaattcacaccagaaaggatgtgaagcagcctacacaaacatatgcaataggataattaagaacaatagcagtaataatcattgatacggagcctctcccctgtgccaggcataatgccacatcttttacctggagtgtctccttgaattcggatagtaactcttggaacaaaggaccatcattatccccgttttacagctaagaagactgagactaagagagactaacgctaactagctccagattacataagctgacaagtggcagagctggggtaaaaagaaaaaggacattagtaaatgggaaactgaggccaggtcagcaacacgaatctgagctgagatggagagaccaccaacgcaagcatcggtctttgtttagtcaacttgcatcctgagaatggatcaccaactcagcccatatgtgtggcttcccactccttagagatcagagcaaggagagaaatgttagcactggctagattcgtaattcatgaattaacatattccatcttctaagctgttcccgggctgagtgtctgggattcagaaaaacaaatggacagcagacagatccttcaggtaattcttcaacattctgaaaactaagactctggttgcaagggtggcagggaatttctggtcccgtccagagcaaatgtgacctgatgaaggcacagaaggtcagattccatgttcttatagacatcaaaggacctaaaggaaaacttgtgcttgcaagagagctcagcctccctccctcgtcaggggaggtcgtggggcctgtgggctggtcaggatttccctccgagacagctctgggtgttcagctcacagacaacacacatcatgctggtcccagtggcctccagcagaggcaaaccatgcacttggagcagagaaagccttgcaaagcagtgcctcccagcaccagtgctgccaggcaagggagcccagggtgtgggaggcacctagttttaagcaatgttaacttcttcttttttttttgagacaaagtctcgctctgtcgcccaggctagagagcagtggcacaatctcagctcactgcaacctctgcctcccggattcaagcaattctcctgcctcagcctcccaagtagctggtactacaggcatgcaccaccacaccctgctaatttttgtattttttgtagagacggggtttcgccatcttggccaggctggtctcgaactcctgacctcaagtgatccgcctgcctcggcctcccaaagtgctggcattacaggcataagccgctgtgtgtggccatagtgttagcctctgaattcccaggtaaaccaggatcattggcaaaacagtgctctgtagcattaagagagaggaattttacaagccattcagaaaatagctgatttctgctgaaaattagaatttcagtcttagtgccaatgaattgtaagccgtttttctgcagagcaggaaacatctgaggccagctctgcattgtgacaatgagaccacagccaaattatatttcgaggctgctgctctttcggttatgtaaatcatagcatgtgacaattacaactggtcatcaaagaactagttggttttgctttcaaaatcattaatcttacctttctagatctgcctcaaagcaatcaaaaaattgactagatacggattcttgcaaactcaggctgaactcaaggaaatattcagtccgatttccatctcagtctttgggattttttgttgcagggcatcagggctgtgtctgctcgtgtcatggggtctcatttccaagcaaacccaggaataactagaaatacttacttgttcctattcttatttttgaaaattgtactgaaatgcatgaatttacattctttcatgagtagaataaaatgatcataaccctacctgacagtgtgaatgcaaattgtgcctgttctctgcagttaagccaggtcgggccagatgggaacatgtaggactctgaggatacagggagtttcccactggcttggaggtagaagtcacacatggaaaatattctgtgggtttttttccccagagtgttcggttttggagtagttggagtctagagtgataaacatgttctagctctggaaacctcaaccaaaaacatctcccaattttcataaatttaagaaaagatttttgttaaaagtagatgctgtagagtcttcggggtatcacagctgataaaacatccattctctctttccccttcaggaacagaattctgatttataaggaagtacatcatatctaaaataaatgacagtggttcccagcctcccatgcaaccaagaaagccatatggccaactattggccaataagatataaatggaagtgctttgtgaaacttccaggaactctccttagaagaaaggagatgagtcctctttttcccatacttcatcccagaacatatatgtgatggctggagctcagcagccattttgaatcatgaggccaaggcccctatgaatgtactctgctctgatgtccatggaaccaccctggcagccctagactccccatctagaccttctctacctgaaaaaagtacacttctgccttttgaaagccacagttactttgaaactttctgtaatttcaatcatatctaatcctagctaatgtaggggatacttgggaaactggggtgattaagagagttgctagaaagactcgggaaaaagcataaggaaataagatttggttgcacagttgttcagagcatgggttacacagaactatgggtaggacctagttcagccacttattaactctgtgaccttgggcaactcatttaagctctctgaatctatgtcttcatctgtaaaatgggccagcatgtcccactttctaggattagaattaggatgaaatgagataatgcacagaaatggtgtgcaacagagtctgtgggtttgtgtccccagatgaatctaagtgtgcctccagcatgaagctataatagaacaggatgcctcccagagtgtagcaagcacccaccaggtggtatgcaggatagctcaggcagcacagccacatcttactaatgatggatttgttccaacaggaattagaataaaacataacgagcacatcaaacctgtgatttcataggtatcattacttaggacaagacaaaagtaattatttcagtttttttaaagacaaatcaatgtaaagaaaattttgggccaggcctggtgcctgtaattctagctacttgggaggattacttgaggctaggagtttgagaccaacctgggcaacatggcaagaccccgtttctgaaagattccaaatagaaaattaggcaggtgtgatggtgtgcacctatagtcccagctatttgagaggctgaggcaggaggatcacttaagcccaggagtttgaggctgcagcgagctatgactgtgccactgtattccagcctgggtgacaaagcaacaacctgtctctaaaaaaaaaaaaaaattttaagaaaatttggaagtattcagtaatgtagtcacacagaaaacgattgattcccaagtgactgaagtttggcaaacactagcccaagagaggtagcctagggatgaagctgcagagaggacaaagaagtgaggtcaagagggccacagtgccaggccttgtggaacacactccagcccccacctccccagcgtgcacccctctgcagccctgccatgccaggccatcataagtggctctgacattctccacccccacccaccatgtgtgcatttctgggggcaggggctttctctcaccatggtaccctcagtgcccttcacatgtttgacacaggcgtgagggccatattcgattcatggcaaagaattgaaccctaggtcttctccttccttgcaaccgttaatgtcagaagctctgaagacacctgggacagagaagagagggagaaaagtttacgtggaagcatagggaaggaagggatgtttgttgaggggtggtgtgatgcagcagaggaagaggaccagaggaaagcagccactggaaataaggaaacagggtttaggaaggcctcactagacctgttaggatggatgcatggatggatggatggatggacagaatgggtgggtggatggatggatggatagatggatggatggatggatggatggatggatggatggatggatggatagatgggtgggtgggtggatggatggatggatggatggatggatggatggatggatggatagatgggtgggtggatggatggatggatagatggatagatgggtgggtggatggatggatggatagatgggtgggtggatggatggatggatagatgggtggatggataaatggatggatggatggatggatagatgggtgggtggatggatggatggatggatggatggatggatggatagatgtgggtggatggatggatggatagatgggtgggtgggtggatggatggatggatggatagatgggtgggtgggtggatggatggatggatggatagaataaaaaagaaagctaggacatggttctagtgttcttagcagacgtcccaccatggaagaggtcatggagcacaggggctttgggaaaggtgtttacaatcctgcctgcctctcacccagacctcttgccagggttggcacacccagatgcctgctgtgaccaatggagaggagcaattctggccagactggtgggaaagcaaggacgaaccacggaggccatccctggcaactgagctgacagctgccacacgaaaatgaggacacagcattgcctaatctgactcatcaaagaaaggcctgaaacccaaattccaaatgtcattcaggccaaagtagatgcgtccatatatcatacctggccttgggtatctgtttgctaccatgatatttatcactgcctgccttctgtgtattgaatggagacaggacacaggctgcttcatagagaggaaagccccaccagctatgctccatcctctggcatcacaagattgacactcatggctgagcttgacgttcgggcaggcatcttagaaggagaacagtctgccctccaccgtgccagaaaagacacatacaagcaagagcatcattctctaaggaaacccgcaggcctccctggcggcagctgcctgcctggagaaaagtggctcctcctgactttccagcagccctctctgtaggcgtgagtgtcagctggggagcctgtgaacagctctaaaagtagacacttttttttcatgccaagagaaaactagaatgctttttgttaaaaaaaatcttggaaaaagtgatatgtttcttccctgccacccgcctcctccttgccacctggtgcatagttgagcgcggaccgccacgctgtgccaatgctggaaagggcagacctgcagtcgcagcactcctttcctgctggccaggaaggccttggccttggacttgagatcccggcctttaaaggacacctttaccacttctctttccccgtagatgtgttggactttttcctacaatttctcccagtgtgttatgttgatcagctttcctcagccttcagcgtgtctaatggccaagccggccttcacatccccactcagttcatgagtctgtcgatgtaactgcctggatgagcaggcaaggatgacctctggagacgtctagtcaattgcttaatgatcggactatatcgaccagaaatggttaattcagttccgcaagtcaaaatctcccagggcttcttggaaaagtgtattacttgcagaagtgatggggaatttaagtcctcccagataaaccaggctggccattggcagcatgaacagagacagtaatgtcttctatttcagtcttgaagaggtataacttttttctcccagctgtgcaaaaatgatttttgtggcattgatgcccacgtgcacacagccccttaaaaagcacgttggagccatgtgcatacctggccctctctcctgaagatttctagacggcaggctgtgtgggttacttcatggctcctagtagtcttccccttttgaatataaattgggggaaaaagttaatattttttatttttaaaattcacaatattcatggaaatacaaatttcccaaaagctcatcacgaatgctgatagcaccatagtacctggcggccaaaaatgcagaaacctggccctaagcttcaccaggatccaagatgcccctctccttcctatggatacagaaggagcctaaagcatagaaatcgttcaacctgggggaggtctaaaacttttatttttatttttttagagacagggtttcactctgtcacctaggctggagtgcagtaggctggagtgcagtggcgtgatcacagctcactgcagcctcgaactcctgggctcaagcgatcctcccacctcagcctccctagtagctgggaccacaggcatatgtcaccaccacacctggctaatttttttttattttttattctttgtagagatgggggtctcactgtgttatccaggctggtcttgaactcctggtctcaagtgatcctcctaccttggcctcccaaagtgctgggattgtaggcatgacacatcatacctggttcctaaaacttttcttaaagcagaatttcttcctaacattcttgtatcaaaaggaaaccatcttcatttgactcaacattacgatcaattgtaaaataggtttggttaaattcagagcttttccagtttgaatgacgaaagctgccatgctgctgctgtaggatgattttaggaagcccacaagatccgagacaccctcactcctcctggccaccttcacctgggagcctgtagctggtgctgaagttctccttggataggggaaagcagccgggtctgagccctgccctcaccatgcaggtctctgccaggagcttgggccccgaggcccagccctgggccagccatcatgggcacctggagtgcacagcctcaagtcgcaaatccattccctttagagttgctggcaagtgtgatgtgtattgttgtgtggttgggagaacaccactctatttctgaaataaaacctggacactaggatttttttcaatgttttacaaaaattgctacacagcccccattttctctaatacaattcaagttcctccaaagttaatttgccaggggttcagagggaggcaaggagagagggtgagtaggcagatcacagagggctttttagggcagtgacgctcttctgcatgataaggctgtgggaacctgggtgtttagatggagggccagagctcgtgacagaccacagtgggttcccaaggaaagtgggacttcacagaactccctctctgaagcagacgatgaagggtccccgacgggcaacacagagagcagagtttaaaggcgccgggcagggagcatggcccgagagcacctgggctgttggaacaggcagcactggaaatgaggaaagcagcgagcaggcggttccgccaccagacggaggtggccgtagacccccaaaaccaagggggtgggagctccgatggtgccatggaaacaaacatgggggatttcagccgctgaggaaagacagtgtgttaacagctggatgaacataccacctaaacagcaacgcgggcaagtcagcaggaactgatgccatgttctgatccagcgagtgggcgtggggtgaggcctgatactgctgagtgccaggctgtccctaacacagactctcggcgtcgtatctgtcctctagtgcccccgtggcccctgggacactttacctccatccctaagaactaacttttacgtcttggaaaacggaaggtgcccattcacgtgggggcaccaggtttttccttcccctgtgcgcacacacaacatccataaacagtaataagggcagctagctcacatccagaggagagcaaagcccacccgagcgacgtggctttgaccctgaagcagttaagttccctgttccaagacacttaaagtaagagttaaaataccaataagagttcttggttattccaaaaatgcatcaaattttccagttaaataaaggataatcttattgttctccatataaggaagcatttcaactttcagtgaaaagttagcaaatatgaacaccaaaaaatgcagctctcctacaagagattcaattaagcgtcgatgcaaccgtgcgaacagcatgttgcagcacaaaggcagcctgtttttctggccattattaatctagaaagcttaatgatgaacaacatttgtgttattgtctacccaaatttaatttatttatgcagcagttaatcttgcaatctgtttttctcaaacgagggcagataatggagacaccgttctttacaagtcttcaggcttttaaattctgataaaatcaggattcttcactgggtcttgccccagctctgaattaaaccactttaaatgtaattatgggacctggccttacagcaggaacatccatttaaaaaattgattggtcaggctgttccacaagacattttatgagcaaacgattgcaatgaggccagaactgtaatttataaaggcaaaaaagcaggtaaatactttattagtggtaatgagagggttgccagctcactgagtctcttctttccttaccagctacttcaccgagccgtggtgcctggccctgttccacgatcgttttattgatctcaggaaagagttacgccaaatcttagcctccaaggaggtaagagtgattaatggatatgtggattattccttgcaaattataagcagctgatagctgttgatcatttagacttttccctacattcccattttatggttttactttttaaaacaacagtatctcatataaacaaactgcggagcatgtaaatgcagactgtgttatttcaggggaagtgattttatttaaatctttttatagggggcaaatttctttttcctttttttaaagaactgtatttttctgatcagctcagagtgctggcagaaaactgaatctgagttgcatctacttgccctcaagaacgaacgttgcattcctttagtttctgcctgtgtttgccagccatttgcggaacatatgtgtgtgtgtgttcttttaaagatgtacagggaagccatccagtgtgcctcaaaagcacactccttttataaccagaacttctttctcaaaatactacagaattaactggacattaggctgcgtagcccaagggctgcacgctcagcaagaaatttgaccccaaggtataaatagtgaggtatttgtgaaactttaagttaaaatatttctttcaatatgagaatctctagcagaactgtggaacgttaagagctgtgttcagtgagtggttgaatctccagcctggctctaccctgcttcactcagccaagtgccggggcctgggttagcttctacctcgtgttaccgtctacataggcaactcccacatctccattgtcacttcctcctgggagcccccacgcgccttattggacggcactgctagggagcgcgcaccctgttcccagtgcgtgccccacttaatcacagctcttgctgtgatttaaggagagtggagaagccactgttatcatcttgactttcccagtgaagaaactgaagtttagaggggtttttggagttttttgtttctgtttttgttttttttttgagatggagtccccctctgttgtgcaggctggagtgcaatggcgtgatctcagctcactccaacctctgcctctcaggttcaagcgattctcctgcctcagcctcccgagtagctgggattacaggcacccgccaccacacccagctaatttttgtatttttggagagacagggcaccatattggccaggctggtcttgaactcctgacctcaggtgatccgcccgcctcggcctcccaaaatgctgggattacaggcgtgagccatcgcgcccgaccagcttagagattttaaatcagctccatggtaacacagcaagcttcacactccggggtgtctcaccccaaagctgggaacatggttactgaaccatacagggccgaagtgcgtgtcctgggaccttctcctcagtgcccccacttttcagtttcactcccagggtccagctgggaactgtaaatcatttcctaatctgaagcaggcttagattgggaaacagaggtttaaagttaaaaccaaacagcagtggcttaggatccagcaagtaaatgcagctgagggaagtggagggctgggtggctgaatgcccaagtcagaggctgctgaaggcgtgcatgtggcaatggaatccactaaagatgctgcaggccaaacagagccctacacttaacccagggctgcaggaggccaacctaactggaaacctgaacccgagttgtaaggctggggctcactgaatgctcagctcctcagacaccttccttccttgcagaatgtcatccgcagcttcctactgcccctacagtaaagggcccttcgtttccaagtgatcccatcaaaactctgtgcctccgtctttcttaaccccagatctgagctcttcagttaacattgtgcacaaagccagggggttttagtcttaaagcttaaaagggaagccatggaaactgtcaagcccaaggcatccaccacgtttcatacaactcactgagataccctcaaacttctacctgtgtacggatatttgctgtggacccatttatgaactcagtgtggacagcaggcccaggcagcagaccagaagtggccacggacctttgcccaagacacactaaaggccctccagccattcttgtgggtcttgtagatttccagaaaatgaaacctccggaagaaaaaaatctccactggaggatttttctatttgcagcatttcgtttgtcaaatgggaaaggccacaggaagtggtgatgcatagagtggtgtctgcctagctcagctggactatgcaatgtggcctctgccagaccctcccattcctgcagaaccgtggccagccgtcccacctcagagagctgtgggggagtagcagaggggaagtgtgcgatggcacagaagagtggcccagtgagtgctgaccaccacgagcagcagtggaggtgacagtggagaagggctgctgtggaaacgacagccacacaatcagatatacaggaatttcaccaaagagtctggtattaggaaaataaaataaaatgaatagcctgcactaaagaataatcataatttattttctcaaatattgaaatgaggtacaaatggccaacaggtatatgaaaaatgcttaacatcactaatcgtcagagaaataaaactcaaaactgcagtgaaacatcatctcaccccagtgacaatggcttttatccaaaagacaggcagtaacaaatgctggcgaggatgtggagaaaggggaaccctcacatactgttggtgggagtgaaaattagtatagccactgtagagaacagtctggagtttcctcagcaagctaaaaataaagctgccatatgacccaccagtcccactgctgggtatatatccaaaagaaaggaaatcagtatatcgaagggatacctacacactcatgtttattgcagcactactcacaatagccgagataggggattaacctaagcatccaacaagtgaatggataaaaaaaaaatgtggtctatatacacaatggaatagtacctagccataaaaataaggaaatcctgtcatttgcaacaacatggatggaactagaggacattatgttaagtaaaatatcccagacacagaaagacaaatattgtatattctcacacatgtgtgggagcttaaaaaaaataaaatttaactcttggagatagtagaatgatggataccagaggctgtgaagggtggcaagaagtgggtggataaagtggggatgattaatgggtacaaaaatacagttagataggatgaataagatctagtatttggtagcacaatagggtgactatagttaacactaatttattttatattctaagataactaaaagagtggaattggaatatttctaacacaaaaaaatgataaatgcttgaggtgatggatactccatttaccctgatttgatcattacacattgtatgcctgtatcaaaatatcacatgtactccataaatatacacaactattatgtactcataataattaaaattaatttttttaaaatattcaaatgatgtaaaccattttatttcaccttctaccttgtcttcagggaagtatacaagttcaatcccattaactatcatatcctagagcttggtatatcaattttcttcttccacatgtaaagaaaggaagaaaagaccattatctatctattatctatgaatattgttagaagtcatctgttatgaagattagaatcattataacatgggccgggtgcagtggctcatgcttgtaatcccagcactctgggaggacaaggcaggcagatcacctgaggtcaggagttcgagactagcctggccaacatggtgaaacccaatctctgctaaaaatacaaaaaattagccaggcatgatggcaagtgcctgtaatcccagctactcaggaggctgaggcaggagaatctcttgaactcaggaggcagaggttgtatttagctgagattgtgccactttttttttttttttttttttttttttttgagacggagtctcgctctgtcgcccaggccggactgcggactgcagtggcgcaatctcggctcactgcaagctccacttcccgggttcacgccattctcctgcctcagcctcccgagtagctgggactacaggcgcccgccaccgcgcccggctaattttttgtatttttagtagagacggggtttcaccttgttagccaggatggtctcgatctcctgacctcatgatccacccgcctcggcctcccaaagtgctgggattacaggtgtgagccaccgcgcccggccgattgtgccactttagtccagcctgggagacaagagcaaaactctgtggcttatgcctgtaatcccagcactttgggaggccgaggcaggtggatcgcccgaggtcaggagttcgagaccagtctggccaacatggtgaaaccctgtctctactaaaaatacaaaaaactagctgggcatggtggtgggcggctgtagtcccagctacccgggaggctgaggtaggagatttgcttgaacctgggaggtagaggttgcagtgagcccagaccatgccattgcactccagcctgggcgacaagagcaaaactccgtctcaaaaaaaaaaaaaaaaatcttcataacatttatttttaaaaagcaaactcattccaagatatctgaaatgcccttgtggaggtaaagagaggaacactggcactgcattatttagctgcaggcaaagccacagcatcactgaccaaggtgaaattttattcagtcaaaatgatccttcaaaatcctttacgaaagatataacaattataaccatatactcacttaacaaaagaaccccaaaatatattaataaaagcagaattgaaagaagaaatagttctaaaacaataatgcagacttctgtattttactttcaataatgactagaacaaccagacagaaaatcaataaggaaatagatgacttcaatagcactataagccaagtggacccaacagtcgtggatgaaattctctgttcaacagtagaatgcacattcttctcaagtgcacacggaacattctccaggataggccatatgttaggccacaaaacaagtgtcaatacattttaacagattaaaattattatattctccaaccacaacagaatgaagctggaaatcagtaacagaaggaagattggaaaaattcacaaatttgtggaagttaaataacacattcttaagcaaccagtgggtcaaaaaagaaataaaaaagggatattagaaatgctaatagatgaatgaaaactaagatacaacataccaacatttatgagatccaaagaaagcagaatttaaagctataagtgcctacataaaaagaactcaaatcagtaacctaattttataacttgaggaactagaaaaagaaaaccaaagtaagcctaatgccagcagaagaaaataataaggattagaacaaagataaatgaaatagagaataagaaaatagagaaaatcaataaaaccaaaagttagttctttggaaagatcaaccaaattgataaacctttagctagactgcctaagaaaaaagactcaaattactaaagttagaaatacaagtggggacattactatcgaccttatggaaataaaaaaggattatgagaaaatgccatgaataattatttgccaaccaattacataacctagatgaaatggtcaaattattagaaatgaacaaactaggctgggtgcagtggctcacgcctgtaatcccagcactttgggaggccaaggtgggccgatcacgaggtcaggagttcgagaccaacctgaccaacatggtgaaaccccttctctaccaaaaatacaaaaattagcccgtcatggtggcacatatctgtaatcccagctactcaggaggctgaggcaggagaattgcttgaacctgggaggcagaggtttcagtgagccgagatcatgccattgcactccagcctgggccacagagcaagacgccatctcaaaaaaaaaaaaaaaaaaaaatgaacaaactaaaaactgacacaagaagaaatagaaaatctcaacagagctataacaagtaaagaccttgaatcaataatcaaaaacctcacacaaagaaaagcccaagaccggatggcttcgttagtgaattctatcaaatatttaaagaattaacaccaattctcttgaactcttccaaaacatagaagaggttggaactattcaatgagatcagcattaccctaataccaaagctagacaaagacactgcaagaaaagaaaacttacagaccaacaccccttttaaatttagaagcaaaaatagccagcagattattagcaagccaaatccagcagcatattaaaggactaaacacccagctgagtgagatttaccccaggaatgtaagggtagttcaacatataaaaatgaatcaatgtaatacaccattttaatagaacaaaggggaggctgggtgcagtgggtcacgcctataatctcagcaatttggaaggccaaggcaggcagatcatttgagatcaggagtttgagaccagcctgaccaacatgatgaaaccctgtctctggtaaaaatataaaaaaattagccaagcatggtagcacacacctgtaatcttagccactcacaaggctgaggcaggagaatctcatgaacccaggaggtagaggttgcagtgagccaagattgtgccactgcactacagcctgggcaatagagcaagactccgtatcaaaaaaaaaaaaaaaaaaaaaagaacaaaggggaaaaaacactatcatctcaattggtgcagaaaaagcatttgacaaaatcaaatacattcttatggtaaaaacactaaaaaaaaaaaaaaacaaactgtcaatagaagggaatgtctccaatctgacaaaggatgtttatgaaaaacccacagataacattacactcagtaatgaattactgaaacctgaattcttatccctgagatctggaataagacaaggatgcctgctttcaccacttatattcagcatggttttggaagttctagccagagcaatcaggcaagaaaaagatataaaagacatccacactggaaaggaagaagtgaaactatctccattctcaggtgatgtggtcctaaagaatccacaaaataactattagagctaataaatgaaatcagcaaagttgcagaatatgaaaccaacacacaataatccattgtctacattatcagttgtattaatctgtttgcattgctttagaagaacacctgagactgggtagtttataaagaaaagagatttggctcatggttctgcaggctgtacatgaagtacatgtactgacatctgcttctggtgagggcctcaggaaatttccagtcatgatggaaggtgaagggggagacagtgtatcacatggcaagacagggagcaaaagagagagggaagtggtgccaagttcttttaaacaaccagatctggcatgaactcagagtgagaactcactcattaccacgaggacagcagcaagccattcatgagggatcctccctaagacccaaacacctcctccaggtcccacttccagcattggggatcacattccagcatgagagttgaagggaaaaaaacatccagaccatattagcatttaataatttgaaaatgaaatgaagaaaacaattatagttattataatagcattaaaaagaataaaatacttgggagcaaatttaaccaaaatagtgcaaggcttacacactgaaaactacaaaacatttttgaaagaagtgaatgactacctaaataaatgggacaacatctgtgttcatgcatttgaagactttatattgttaggatggcaataccacccaaaacaatctacaattcagtacaatcctgtcaaaattccaagggcatttttaaaaagaaatgcaagtcctaagttcctatggaaatggaagggactccaaatagccaaaactatcctggagggaaaaaagaacagagttgaagaactcacattttcttactacaaagcaacagtaaccaagacagtgtggtacttgcatgagaatagatatatagatcaatggactaaaattcagagtccagaagtaaacctgtttacatgaaaatatgttcagcatcatcaattattagggaaatgcaaatcagaaccataatgagataccactttacagccactggcatggctataatacaaaacaaggggggaaatagtgaagatatggggaaaatgggaactgaattgctggtgggaacataaaattacacctgctatagaaaatgttttgatggttcctcagaaagttacacacagaattaccatatgactcagcaactgcacttctaaatatatatccaaaagaattgaggccagacgtggtggttcacacctgtaatcccagcactgtgggaggctgaggtgggcagatcatctgaggtcaggagttcaagaccagcctggccaacgtggtgaaaccacatctctactaaaaatacaaaaattagccggacgtgatagtgcacaccagtagtcccagctactcgggaggctgaggcaggagaatcgcttgaacccaggaggtggatgttgcaatgagccgagatcacaccactgcactccaacctgggtgacagaacaagactccatctcaaaaaaacaaaacaaacaaacaaacaaagaattgaatgaggtattctaatgattgcttgtacaagaacattcaaagcagcactgtttagaacagccagaaggaggaaacaacccaaatgtccatcaacatatcaatggataaacaaatgtggtctagccacgcaatggaatagtattcagccatgaagagaaatgaggtactgatacaaagcacatgaacctcaaaacattatgctagaaggcagagaaagcatttgacaaaatttgcatcctttcatgattgaaaataaaaaacctctcaacaattaggtataaaaggaatgttcctgaacacaataaaggccgtatatgacaagcccacagctaacgtcattctcagtggtgaaaagttgaaagcttttcctctaagatcaggaacaagacaaggatgcctactcttgccacttctattaaacataggatcagaattcctagccagagcaatcagggaaaaagaagaaataaacacatccaactaggaaaggaagaggtgaaattgtctctgtttgctgatgacatgatcttatacacataaaatccttaaagactccaccaaaaaacttttggaactgataagtgagttcagtaaagttgcaggatacaaaaccaacatacaaaagtcagtagtgttggctaggcatggtggctcacacctgtaatcccagcaccttgagaggccaaggcgggcagatcacctgaggtcgggagttcaagaccagcctggccaacatggtgaaaccccatctctactaaaaatacaaaaaattagccagatgtggtggcgggtgcctgtaatcccagctactcaggaggctgaggcaggagaatctcttgaacccaggaggcggagattgcagtgagccgagatcatgccactgtactccagtctgagcgagactctgtctcgaaaaaaaaaaaaatgtttatatacactaacaataaactatctgaaaaagaaattaagaaagcaattccatttacaaagcatcaaaaaaaatatttaggagtttttaaccaatgagttaaaagatctctatactgagagctataaaacattgatgaaaaaaattgaagccaacacaaataaatggaaagatatcatgtgttcatggattagaagaattcatattgttaaaatgtccatactaaccaaagcaatctgcagattcaatgcaattcctatcaaaatgccaatgtcatttttcacagaaatagaaaagacaatcttaaaaatcatatggaaccacaaaagacccacaaatagccaatacaatcttgagaaaaaaaaaacggaaggcataacactacctgatttcaaaatatatttcaaaaccatagtaatcaaaacagcatgtgtattagtccattttcgcactgttataaagaacttccctgagactgggtaatttacgaaggaaagaggtttaattgactcacagttccatatggccggggaagcctcaggaaacttacaatcatggtggaaggggaagcaagcaccttcttctcaaggtggcaggagcatgagaagagcaaaggaggaacttccaaacacttataaccatcagatctcatgagaactcactcactatcatgagaacagcatagttctcagcatagttcaccccactatcatgagaacacccactatcatgagaacacccactatcatgaggacagcatagttctcagcatagttcgcccccatgatccaaacacctctgtctttcgacagacacgtggggattacaaattgaaatgaaatttgggtggggacacagagccaaaccatatcagcatggtactgccataaaaacagataaatgtaccagtgggacaggatagagagtcataaataaacctacacatttacaggcaattgatttttgacaaaagtgccaagaacacacaatggggaaaggacagtccctccaataaatggtattgggaaaatgggaacattccacatgcagaagaatgaaattggactcttctctcagcccatacacaaaaatcaattcaaaatggagtgaagacttaaacataagaccggaaactgtaaaacttctagaagagaacataggagaaatagttcttgacgttggtctcagaaaggatttttttggatgtgacaccaaaagcacaggcaacaaaagcaaaaacagacaagtgggtctacatcaaatttaaaagcttctgcacagcaaagaaaacaacagagtgaagagacagcccacagactgggagaaaatatttgcaaatcatacatctgatttgatgtatgatatccaattttggctaatatccaaaatatacaggcaactatataactcactaactcactaactaacaggaaacaactcactaacaggaaaacaaatgacctgatataaacataagcaaaggacctgaatagacacttctcaaaagaagacatacagtaggtccttgaataacatcctttcgttgtaacattgatgaggaaaacaaagtcattcccgggccactgtctgtggagtttgcatgttctgcccatgtctgtgtgcattgtgggttttcaccaggtacactggagttcaaagatcagaaaaaaacaaaacactatgctaagtgaaaagagccagacacaaaaggttaattggcatgtctaaatggtcccagtgtgcgtgagtgtgggtgcaggtgtggatggaaatgtaccctgtgatgggaggggtcctgttcatgggttcctgctttgtaccctgagctgccgggataggctccagcaacctaccacccggaactgaaataactcggtaaataattaccttacttgtttatgttaatctttcttaaatgtatcatagcccacaattattttagtgtttaatattagaagtgtttttcatctttatttagaagtttgatgatgtttttgtgaccagaaatatgctgtcggaacttcactcttgttcttatcaattagcctatggtaaaattggttttgttatatgtcatctcgcttaaagttacagtttccaggaagctacgaggacttactgtgaccaaaagatatatttaaaaaaggatcaacctcatgaatcatcagggaaatggaaattaaaaccacagtgagctaccacctcacccttgttagtatggctgttatagataaaaggttggcaaggatgtggagaaaagggaattcttgttcactgttggtggtaatatagattggttcagccattttggaaaacagtatggaggttcctctgaaaactaaaaatagaattacatataatccagcaatctcacttttgggtatgtatccaaaagaaatgaaatcaatgtatcaaagaaatatctacattcctatgcttattgcagcttattcaaaatagccaggacatgaaatgaacctaagtgttcatcaacagatgaatggataaagaaattatggtatatatgcacaatggaatactattcagccttgaaaaaaaggaagttctgttctgtcattttcaacaacatgaatgaacctggaggactttatgctaagtataataattcgggtacagccgggcatggtggcctgtagtcccagcactttgggaggctgaggcaggtggatcatttgaggtcaggagttcaagagcagcctcgcaaacatggtgaaacctcgtctgtactaaaaatacaaaaattagccaggcagtagtggtatgcacctgtaatcccagctactcaggaggctgaggcaggagaattgcttgcacccaggaggcagaggttgtggtgagccaagatcataccactgcactccagtctgggtgacagagagagaccttgtctcaaaaaaaaaaaaaaaaaatcaggtacagaaaggtaaatactgcacgatctcacttacatgtggaatctaaagaagttgaattcataagggtaatgaggggaggaaggggtggtcatactgtgtgaagggagatagtcacactgagggaaggtggtcacactgtgagaagggaggtagtcacattgtgagagaaaaagtgatcacactgtgtgaggggaggtggtcacactgtgagagaaaaagtaatcatactgtgaaagggaggtggtcacgctgagaggggaggtggtcacactgtgtcaggggaggtggtcacactgtgagagaaaaagtaatcacactgtgaggggatgtggtcacactgagaggggaggtggtcagactgtgtcagaggaggtggtcacactgaggggaggtggtcacactgtgagaggggaggtggtcacactgaggggaagtggtcacactgtgagaggggaggtggtcacactgaggggagatggtcacactgcaagaggggaggtgatcacactgaggggaggtggtcacactgtgagagggaaggtggtcacactgtgagagggaaggtggtcacactgtgtgaggggaggtggtcacactgtgaggggaggtggtcacattgtgagagggaagggggtcactgtgagaggggagaaggtcacactaaggggaggtagtcacactgtgaggggaggtgatcacactaaggggaggtggtcacactgtgagaggaggtggtcacactgtgaggggtggtcacactgtgaggggaggtcacactgaggggaggtagtgacactatgagcagagatggtcacactgtgaggggaggtggtcacactgaggggaggtagtgacactgtgagcagagatggtcacactgtgaggggaggtggtcacactgaggggaggtggtcacactgtgaggggaggtggtcacactgaggggaggtggtcacactgtgaggggaggtggtcacactgtgaggggaggtggtcacactgaggggaggtagtgacactgtgagcagagatggtcacactgtgaggggagggggtcacactgtgagggggaaggtggtcacactgtgagaggggagaaggtcacactaaggggaggtagtcacactgtgaggggaggtgatcacactaaggggaggtggtcacactgtgagaggaggtggtcacactgtgaggggaggtcacactgaggggaggtagtgacactatgagcagagatggtcacactgtgaggggaggtggtcacactgaggggaggtagtgacactgtgagcagagatggtcacactgtgaggggaggtggtcacactgaggggaggtagtcacactgtgaggggaggtggtcacactgtgaggggaggtggtcacactgaggggaggtagtgacactgtgagcagagatggtcacactgtaaggggaggtgatcacactgtgaggggacgtcacactgtgaggggaggtggtcacactgtgagaggggaggtgaccacacaggggaggtggtcacactgaggggaggtagtgacactgtgagcagagatggtcacactgtgaggggaggtggtcacactgaggggaggtagtcacactgagaggaggtggtcacactgaggggaagtggtcacactgagggggggtggtcacactgaggggaggtggtcatactgtgagtgaggagctagtcacactgaggggaggggtcatactgcgagtggaggtagtcacactgtgaagggtggtagtcacactgagaggaggtggtcacactgaggggaagtggtcacactgaggggaggtggtcatactgtgaggggaagtggtcacactgaggggaggtggtcatagtgtgaggggaggtggtcacactgaggggaggtggtcacactgaggggaggtggtcacagtgtgaggggaggtggtcacactgaggggaggtggtcacagtgtgaggggagatggtcacactgaggggaggtggtcacagtgtgaggggaggtggtcacactgaggggaggtggtcatagtgtgaggggaggtggtcacactggggaggtggtcacactgtgaggggaggtggtcacactgagaggaggtggtcacactgaggggaagtggtcacactgaggggaggtggtcatagtgtgaggggaggtggtcacactggggaggtggtcacactgtgaggggaggtggtcacactgagaggaggtggtcacactgaggggaagtggtcacactgaggggaggtggtcacactgaggggaggtggtcatagtgtgaggggaggtggtcacactggggaggtggtcacactgtgaggggaggtggtcacactgagaggaggtggtcacactgaggggaagtggtcacactgaggggaggtggtcacactgaggggaggtggtcatagtgtgaggggaggtggtcacactggggaggtggtcacactgtgaggggaggtggtcacactgtgaggggaggtggtcacactgagaggaggtggtcacactgaggggaagtggtcacactgagaggaggtggtcacactgaggggaggtggtcatactgtgagtgaggaggtagtcacactgaggggaagtggtcacactgaggggaggtggtcacactgaggggaggtggtcatactgtgagtgaggaggtagtcacactgaggggagggggtcatactgcgagtggaggtagtcacactgtgaagggtggtagtcacactgagaggaggtggtcacactgaggggaagtggtcacactgaggggaggtggtcatactgtgaggggaagtggtcacactgaggggaggtggtcatagtgtgaggggaggtggtcacactgaggggaggtggtcacagtgtgaggggaggtggtcacactgaggggaggtggtcacagtgtgcggggaggtggtcatactgaggggaggtggtcacactgaggggaggtggtcacactgaggggaggtggtcatactgtgagtgaggaggtagtcacactgaggggagggggtcatactgcgagtggaggtagtcacactgtgaagggtggtagtcacactgagaggaggtggtcacactgaggggaagtggtcacactgaggggaggtggtcatactgtgaggggaagtggtcacactgaggggaggtggtcatagtgtgaggggaggtggtcacactgaggggaggtggtcacagtgtgaggggaggtggtcacactgaggggaggtggtcacagtgtgcggggaggtggtcatactgaggggaggtggtcacagtgtgaggggaggtggtcacagtgtgaggggaggtggtcacactgaggggaggtggtcatagtgtgaggggaggtggtcacactgaggggaggtggtcacactgagggaaggtggtcacactgaggggaggtggtcatagtgtgaggggaggtggtcatagtgtgaggggaggtggtcacagtgtgaggggaggtggtcacactgaggagaggtggtcatagtgtgaggggaggtggtcacactgaggggaggtggtcacactgtgaggggaggtgggcacactgtgaggggtggtagtcacactgagaggaggtggtcacactgaggggaggtggtcacactgaggggaagtggtcacactgaggggaatggtcatactgtgaggggaggtggtcacactgaggggaagtggtcacactgaggggaatggtcatactgtgaggggaggtggtcacactgtgaaagaagatgatcacagtatgagaggtcatccttcaagaggcaagtgcccaaaaatctgtttataatctagagcaatatttgcctgaaataaactttaaaagtggttttacgctatttaacccagtgtcagaacagcagcatacaatatgagctcaaaatcttgtataattttagtaaggtaattgtttttggttggtttgatacaattctccagaaaaattaaggaagaaagagccaacctcatacacattgcagaatatatccacgaggccttactggtggcacccaaagttttcagaacctcccagtacttagttgtgagaatcagttgctttttccctatcactgcctttattgctctagtttaaatctgaattcctgcaaccctcactgactgctctttccaatgtgtgcataatctccagcaccccgttgtgtcttgcttagccaagtggcaatgactttatgcctccatatagcttgagtctgttttcctatctataagctcttatcactagtaagttaataatccaacaaaaccctgcaaggaattgccttttctattcaaaatagaaggaattattggaagttgaaataaatgtaccatcagagtccacagactcttgatctagggtgatgttcaagaatcacagtgtttggaaagcagccagctcaaccctgggggatgtgctttctagaagtaccctgctctggagggcagatatgcagtggtgaagcaaatatagcagatgttaactgtggagtccaggtgcaggtgtgcaggtgttcagtggacaattcttcaacttgtctctgaaaatttttataatgaaatgttaggaaaatctctactacactgtacctatgtgcagcataagattctcagcttcaaacaactttattctttctgagccctacctttttaaatatatcaataaaatttgacttgattgtgaatttattctaaggttttaaaatcccacttcttgggaattataagcaagaaaacttttcatataggacctttcaagtaaaaaggtttaatcactccttttttttatttttaaatttttttatttttaaaacagaggcagggcgtggtggctcatgcctgtaatcccagcactttgggaggccgaggtgggcagatcacctgaggtcgggagttcaagaccagcctgaccaacatggagagaccctgtccctactaaatatacaaaattagccaggcatggtgggccatgcctgtagtcccagctacttgggaggctgaggcaggagaatagtttgaacctggtaggcggaggttgcagtgagccgagatcatgccattgcactccagcctgggcaacaacagcgaaattccgtctcaaaaagcaaaaaacaaaacaacaacaacaacaaaacaagtatgatctacagatgatttttatctgaaaatgaagggcttgaaatgactaacctggatgactcttgaggacattatgctaagtgatataagccagtcacaaaaaaaagtactacagggttccactcatatgagatgcctgcgtagtcacattcatagagacagaggtggtttccagggcctggaggatgggagggtacggagctggtgtttaatggagacagcgtttcagctgacgaagatgagaaagtcctggagatggacagtggtgagggttacacagcaatgtgaatgtacttcatgccactgaactgtacacctaaaaattattaaaataagacatgttgtgtatactttgccacaattaaaaataaattttcaaaagctagaaaaaaaatgaccatccttgcagagctgactactgttgttttcattctcatgaaactgccgttacaactgtgcagggtccaattaatttctgtatctggcctcttactgtgttttacaggaggaagatcttccttccatagagcagttagcccatcaaatagaagatgaggaaatcaacccgactgagaagcccaggcaatacctcaaaagagtttttgaggaatccatctacaaaaccctggtggagagaagcactcttgactacctgcactataaccgctaccacctgcccatgtacgcgtggccaggcatcgtttagttgtaggcagggtctcccctttatggttttcatttatttagttcctggaaacgcgctctgtagaaatagaaaagttctctgcagcctggtttgacagcgaagccagcccctggtggttttgttcattcctttccttccctgacttatgcctgtagttttctatcatcccagtaggtggcacacggccgtgtgcctctcttctggggcaggctcgctttacaaatcccaggcatgttcctgtgcagaataatccatttcagcaataaaatgagatcatagtgtgtaaaacttgtttttaccttgggtgtgattctgtttgatttcctggaaacttccgctgccagtcttgttagttcttcacatgtttacccagcagtacttgtgggtgataaaaaagaaaatgtgcccagaatggaaaattagtaaacagatgatgagaaattaaatctgcagtccaacataagaagcagtgattgtgtaggaaagcttacatgacctttggaaaggaggaggctgtatttctgtttcaaattgcagatgaggagcataaagtcacagaaaagttgggtgctcaaggggttcacacataggttttagattagaacgtggtaacgtggtaatgggaagttcatcaaagttcattttctttgatccttagcactgttgctttgcattgaggggggcggggtgaaggggtccctagtacatgtcaactctaatgtggatcagaaaccctttttcttataaataaagcaaattaattgcccactagtaactaactgcatggattcaggaatgagggggaacaacacataagattgtgctcatttattgggtctctcagtagacagtgtgacacaatttttcacagcagggcttaaaactggtttttgtgaacaattccagttttttcttcatgtgttgtattttatgtaaatgttgagcaaaagttggcacaagataagggatacacaactattagaaggaaagtcagagctggcattacagcactgtgtacacattatcaaactctctgctgcaaactgccaacttgttggaactgcaaagttatttgatattgatatttctgcaaaataaaattgttccagaatactggactcttgattttcccaaggcaggcaaaagcaagcaataaatgctcctaattccttcacatgcacgttttccgcaaatgcatgggtcactggggggagggtccagcattggccatatggtacacactgtgtcacttgaatggggaacaattgctactggtccactcttcagaattcagacccagcacacgtggaaccatatttcaggggctggtgaatgagtcagctcaagcaactctcctcccctgtcccattcccctgaaaggacctgggtcaaactcataagcaaaaggagtaagtttctgtgacaggtcctgggacccctggatgcagattaacagaacaatctcggaggatcaacagttatgacttctgtgaccaagtattagcattaaaaagcctccagtcacataaaagtgaccccaaatgacaatgtcaaccttaataccaaatcatgcataaatgtgacagtaagttttcctttgctgccttttgaaaaaggagtgttagtgctccataagtatcacagcagacttgaaaatatctagaatatattttagtgtacaaagtatattgggtgacattattttaatccttatctcacacttcgaaagtgggtaatttacaagctatttagcatagatgctaaataatttcctgaatctaagaatcttagcatatctgttcagacttgaaaactttatcactgaacaagttgcctaagaataaaagaggaattcaagagttgttggttataacttgcaattgactattctaagggctttgggaaaataacggtgaagataaagcctggcttttaaaaggaagggcttgaaacagaccaatatttggacttggcttgcacaaggcatgaattccgtaagtggattgaatgcttggcgtctctacatatttcagcacttgctgctgagctggggacatcttgggctgtaagcctgatcttggaattctacagttttaagcaaagaatattaatcagaaaataccaaagttaattttccaaagttttattcccccaaatcacatgcaacaaccccgccttctgatgcctctaattgctctcccaacagatgtcagtttttaataaagagtgtaaccaccgcctttccaaaaatggcttattatggttttactacactcaaacatcacaggagggcaagagaaaaatcaacgatgaagtgagggagggaaggaaatatggcatggagcataaaatgtaaagccagccaatcaatatttaccctttcaagagggagagagagagaggagggagggagggagggagggagagagagagagagagggtgcgcatccgagtgagccagtgttagccaagaagcagggagcagggctcgaaagtcgctgagcgccgagtgcgaggagctgttgattgttttctggttgaaagaagaagtgatgataaggctgggataaagtgagcgccggcaggggcgcagagcccgcagctgtatgctaatgctcacagaaaccaagcctccgcgtcccccattaaagcaggcgaccaggaggccacacatcactgaacaaataggctctctctagacaaataaaataacacacgttggcctgtggggagtggggggagagtaagagcagggagaagagtggggggagagtaaaggaggggggagagagagaaggaaagagagaaggggagaggaatgggagactgggagagaggtgggggggaagagagggagagaagacagaaacaagcgagggaagagacaggagagagggacgagaggagagaggggagcagaaagacagcaaagagggctgggggaactggatggggagggagggacagtgggaagaaggggctgggagagaagaagggggccagttatgggggggacaccacaggtcgggggggggattaggagtgaaagagatgggagagagaggagaaggagggagaggtgacaccgtggggagcaagaaaggaggggaaagaaaagaaaggaagagacagaaggagagagaaggacaggaggagggagaggaggcggatgacacaaggagggaaccagagggcgagggaggagagcagggacgggagaagagggaaaggcggaggagagaggaacggcggtggggggggaggagcacccgccaaccccatagcaagaacgctcgccagggtagaaagtatgcccttgtggaccccaggagtctggctgcctcttcgtcctcctgcggcaggcgaggcggggtgcaggtgtgagtggggtgggaggaaggggaaaggatcggggtcgccgcagcctttctggtcagtttcgctgggttttgtcagttccgtttgagaccgaggcgcacggactagcggccgccagcacctcacaggtggaggacacctcttgcgccccaaggtcaatgtcatcccgatgggtcccgtgccgtcctgactctccctgacctaattctttggttatgactttctcaccttctgggcttcgcctctgccagctttcgccgacgtcgcccttcccgccgcccgcccgggccttcctacccgctctcctccctccctggcccgacggtcccactgaggcaaaaacaaacagccctgagggcacttcaaggagcgtgcagtggccccgacggtactctcggggggataaaagaggtggccagccacgccgtcggcccccggccgaataatgggcgcgcagcagattgccagggggcacttgaaactcgaggggagggaaatacttgagcgcggtccctccccgcgaggacgcacgacgcagcctcgcggatcgtcccttgttcgctctctttcatgcactctccttttgtgtggaattatctaaacgggagatccctggcagctttatgctaatgcgccgaacaaaggcaacggcccgcgggcgggaggcccggaaggtgcctggggccgggccgggcggggtggcggccaggcgggctgcgcgtgtctctcgcgtgcccctgggactgacacaacaacccctcattcctgcaaatacaaagcctctcaccggctcgggtcgggcgcacccggcgcagggaggcgctggtccctccgggcggcgggcactgcagcggtaacgcacggttcctgccggttgtggctcgggggactgagggccgggagtgggggcttctgtgaagccagaagagaagtctgcagcagagtggtgatgaggggcgctgacacctcacccccaacgccgacgtctccaaacgcgataccctctgcggggtgagaatgcgggcccgcccggctcctcccgtgaggccagggcctcctgttctcctagacaccccaaggagccaactcctccgcagaagttccccgcttctgctcttatttccaagcttcgcgctttctacaaactccctgttgccttgactttgatttccagccgtggtgagggtcagagtgaaccccggcgcgctccccgacggcatccccgcacaccaggataggagaaattggagggcctggggcctcgggctccgcagtcgtcggaggaagaacccaccgcggggtccgcaagggaaagtgaagaggcccgggatttttccaaagcgctggccaggaccccgaaggaaggggaggagtcacctgaagccggggaaggccccttgggtgctctgccttggatccttatgttcactgactttcgcgaagcccccctggaggggggcaaatccgcgctgtttcccccaacttaacttcacgcggcccattctccgaatcgcgtgcgccaaggccggcgtcgggggcgcactgtgatggcgctttgctcttcccaggcgaagacaaatatctcgacccgatgtccccatgcatgcgggtgcacaggttctgagaaaatcacgcagaaggcggctgcgatccacggcccgggctgggctacacctgcttggaggtcgctggtgtgtgcgtgcgcgcgtgcgcagcctaactccttccagccccgggtggtgaaattagtttccaatactagtacctttcaagtttccatttattttgactgtacccgtctgaaagcagatttcatttacgctagcaagactggaagccacaaataaagaaaaagaaacggattcattgaatctcagtatctcagtagcgtttaatagattcccttggctaaattcagagccctgtttgaattcactcacgcaggagttgttttgttttttttgttggtagaggtgccggtttcccatccccacggcttatttacaattatgggtgttgttatttttaaaggattcacaaggtgactaactctctgttatctgttgaatggaaggagtgttacatatgcaagaccgaatggggcaggccgagcccccgccctatgctattctacaatccagatgggattcgtgattagaaaataaaattggccaaagctgtctcggaatccttttcccacttctaatttcatcagcactattaatcagagctcaaaagagcaaggaaataacatcagttacttttagatagaaatatgtttataaattttagataaactcattttaagatttctaacttttggggagactagcactcaccacagcatttttaaaactagggtgagacttttcaaaatatatttcactatatgcattcttcccttttcagtgtgtgagttaaaatattacaaacataaaattatcaaatatctttcccttgattaaccaacctgattaaccccttaattaattaagcctaacaactgtccccatcacaacttatgactcatgtggactctatttttacatgtttaatttctacgccagggtattttcagagggaaaatccaaaacaattaaataccttcagtggaattaagcgtaagtaaaactcagcaaaatctgtctggtatacaaagctttgcagaaaaatgtttccttctctttcaataaagtgacattttcctcacagcatatgacattttatgtggcttggctatttgttccccagtgttggacgatcagggccactacgcactcgtggggttctctgccctgtcccccgaagattctgccttttgtgtttcctcggggctgggctggacagaggatggaggcaggcggcccagtctgggtccaaacggaacggcagcggaggtgggggtgggggtgggggcggggggaatcttcgctgttgtctcttcctggtggcacaggggaggcggcttgtcctctcggaggcctcagcctgcctcagagtacagattgccccccctccccccgtccagcacgcgtctcttttgcgtccagattggccgcgaccggagctcaatagcaggaggttaatttccttcacaaaggtgaagggggcacggctccgtgggggctgcgcccagacaggcagcccctttatttcgcagcgccttgattggagcccttgatttagcatctgatgtcaaccggcaaacaaaatgcccgctcggaatgaaaatgcatgaggccgcgcggggaggagaaagccaacttcactggggcgcacgaggccgaccgcgcgtttcgggcttcggccaactcgacccggattaaccgagccttggaccacgcggaagctccgggcggcctgggtcgggccccgccaaagatgccattcccaagcctccaagaacccaaaagttcagaaattcacgttcctctgggaacccagcccagcccgcccgcgctccaatcccgcgctttcgggagactgagaaggccgtgccaattccttctcaaactcgaaagaaaccttctctagccccgtgggcgcgcggaggctgcgagcacaaacatcgccctcggccactgccagaaggccgggccccctgtccacacttggaaccccggggaacccttttgcttggcctcttgggtccagcggcccatccgtccaaggtccgggcggaggccgtccggaccctgctgctctctcggattcttgtttatttcccaaacaccacgcggagccactgcgcctccgcaacgatctcccccgcaccgccccggcgcgcccccgcccccacccaatcagcgcgcacaacttccccctcggctccggctcgcggattgaaccctcctgacatatttggggccattcttctcctttgttgctattttgctagcgacccgcgggtaatccccgcgcgggaggggggcgtgcattgtcgcgctgatggacgggcccatttggcggctccgcgccccccggaggagagacacaaagcccaggcacgtgcgcctccccatagagaagcagcagaccgtgaagggaggcggggccgggcgtgtgcctggaccgggcggggcggcggcgccgggcggggcgaccaggggcgcgcgcgggggccccgcgccctcaggtacatctgccgcacctaccgggcgacccccgagtcccggcccccttttggccgccccatcgccctcccaccctgccaggctgaggagctgcggacgcgctgattggctccaggggaagcgggaggcgagaacaatggccccctccccccgttaaaagggagcggctgccgggcccggggacagggacgcgcgtgcagggcgcagagctgggccgagccgtcgccggcgccacgcgagtcccgcagccgccgcgcccgggcaatgggccgggggcactgagggccgccggggccgagcgcggaggggggaccgagccagtgccgtgccctcgggccgcgccaacatgccccgcggcttcctggtgaagcgcagcaagaagtccacgcccgtttcctaccgggtccgcggcggcgaggacggcgaccgcgcactgctgctctcgcccagctgcgggggcgcccgcgccgagcccccggcgccgagcccggtccccgggccgctgccgccgccgccgcccgcggagcgcgcccatgcagcgctcgccgccgcgcttgcctgcgcgcctgggccgcagccacccccgcagggcccgcgggccgcgcacttcggcaaccccgaggctgcgcaccccgcgccgctctacagtcccacgcggcccgtgagccgcgagcacgagaagcacaagtacttcgaacgcagcttcaacctgggctcgccggtctcggccgagtccttccccacgcccgccgcgctgctcggagggggcggcggcggcggcgcgagcggagctggcggaggcggcacctgcggcggcgacccgctgctcttcgcgcccgccgagctcaagatgggcacggcgttctcggctggcgccgaggcggcccgcggcccgggccccggccccccactgccccctgccgccgccctgcggcccccgggaaagcggcccccgccccctaccgccgcggagccgcccgccaaggcagtcaaggccccgggcgccaagaagcccaaggccatccgcaagctgcacttcgaggacgaggtgaccacgtcgcccgtgctggggctcaagatcaaggagggcccggtggaggcgccgcggggccgcgcggggggcgcggcgcggccgctgggcgagttcatctgccagctgtgcaaggaggagtacgccgacccgttcgcgctggcgcagcacaaatgctcgcgcatcgtgcgtgtggagtaccgctgtcccgagtgcgccaaggtcttcagctgcccggccaacctggcctcgcaccgccgctggcacaaaccgcggcccgcgcccgccgccgcccgcgcgccggagccagaagcagcagccagggctgaggcgcgggaggcacccggcggcggcagcgaccgggacacgccgagccccggcggcgtgtccgagtcgggctccgaggacgggctctacgagtgccatcactgcgccaagaagttccgccgccaggcctacctacgcaagcacctgctggcgcaccaccaggcgctgcaggccaagggcgcgccgctagcgcccccggccgaggacctactggccttgtaccccgggcccgacgagaaggcgccccaggaggcggccggcgacggcgagggggccggcgtgctgggcctgagtgcgtccgccgagtgccacctgtgcccagtgtgcggagagtcgttcgccagcaagggcgctcaggagcgccacctgcgcctgctgcacgccgcccaggtgttcccctgcaagtactgcccggccaccttctacagctcgcccggccttacgcggcacatcaacaagtgccacccatccgaaaacagacaggtgatcctcctgcaggtgcccgtgcgcccggcctgctagagcgcgccctccaccccggcccccgaactgtgccttcgcttggagacccacaaagagagtgcgccctgcactccccgaacccgagtccgcgctgggggagcctcgcccccgcccccaccgggtgaaagtgtcgtctccgcttctctcggtgtggcgtgacggtaaccccatactctccttttgactccttttggaacccccacttttacgttgtgtccctccgcctcccccatggcgcaacaggagtcagtctctttctgtacaagggagaaaagctgtacgcgtttgtctcgtggttggaagcctccccttggcggggagaagctttttttcttgctagtattcgctgtgttcatggtctagaaatgcggtctggtctcgcctcgcctaccaatctctgctctctatgtatgtagcgtacgggttgttttgggtgaatcttgaggaataaatgcctttatatttcacaggctgtaaattgaacttcccacacgattagctttattatggcttgtgaactgctggagtctggctttacctttttgtatgtgaacaaatcaaattgcttaaaaaagagttttctttagtatagccacaaatgccttgaactgttgtctgggattgttttgtggggggagggaagggagtgttccgaagatgctgtagtaactgcctcagtgtttcacgtaagactttttggtttgatcatctttgttgaggtaggactatcagttccctctaaatgtatatgttgatttatgagtaattgttatttattctttatttatttatattaattatgaagattatgatattatttgattgcagatttttttggcgcgctgccccctccccaccctgccactcttgacattccactgtgcgttttagaagagagcctttttctaaagggatctgcttaaagttttaacttttatacctatctgagtgaattacagacaacctatcatttattctgcttcgagggtccccagggcccttgtacaaccgacagctcttacttttaaatgcaatctcttttctacatacattattttcttaattgttagctatttatagaaagcttcaatagaactgtttcaactgtataactatttactattcaaataaaatattttcaaagtcaaagtgtggtggcctgatttctgcatcacatgctttcaggacgaatttaaaatagagcttctgatggtttcttaaaatgtaactttattttttattaggaaaaagggaaccaccaggatggtgggttttcagagctgaacctcagctgcggaactctgcccttctggcagcctgagggtatagccttggtagcggctggctgaaacaagccttgttggggtccttagtaatgtgccaggaggcgggttagaatgaaggccctgggcatcttttcagagaaatctagatcagtgtccctaagaagctgttctttgcactgcactttcatttagcaagtccttcattcccaaaaatttggggctcagggtgatagtaattcctcagataaataaagtgggtagtttttgttcacgacaagaaaggagaaatgactttaccgtcagatttgcaaagcacgggcagcaacccgattcacatttggatgcaatgggaagttaagcaactgggggcaagggcttagaaataattttccaatcaggtgagcagtctgtttggggggaaaatggaacaccatctgtttggggtattaaatttaataacaggtaattacaatgttttccattatgtgtcactcagctctttcaagaacaattctgactctcaccagtgaatattttgggttgttttcctctgtcttggaaacatctcatgaaggagctgtgctaaatctcacaattgtgcatgtgtgtgttcccttccttttgtgtgtttttgctgcctttttttttttcctgaggtccgctaaagctaacatttgcctgccaaagagattttagaaatctgcacagtaaagggatttgcatctccaaagaagagctggaatgaggctgggaagggcagtccatgaggaacttggaaggacaaactgaggaaagagatcattttcagattgtgagcctcaagttttctgtgggacggggtttagctagcaggctcagctagcaggaatgtggaatattcctccctttgtgagggtctggaaacagccttcgaataacaatgaaggagaaacctctacaggtaagttgcctccaggacaaattgcatggagctttttatcactgatgactacatattttaccagtttggaaaataaaagaacaaaaagctcagggctggtacaataggaaagcacagggacagagcagcatttataacatcctaaaaactttaaacgaaacaaagaaaaactcaaatgtgtgggttgatggctgctgcttctcccctcctgcaacagtaatactggagaatgggagcattgaaaatattctctctgagttacaccaaacattaaaagataccccaaactgagggtcagtgtatgcacgttctgtggcaataaagtttccttaaaaactggaagattggccgcacatggggagtccagactcgtctgcaggaatggtagcttgtaactatgttgggctcactgtggttctcgtctgtaatcacaaaaacatgaattcatctaagatccaccttcatgagggtaaatataatttggttgttcacaaacatgttccttcatcccctgtataaatttatttcaatggaataaatggaacccgaaacatctatgtgagatattaaatgaaactgtatagtaaatggagttgaaggcaatgaaacagcgtagaaatagaaaaacttggtcaatttttatcacggtaacacaatatgagttagcagaatataggaagggaatcaggctctctccccttttgcttgcctccctggataatacgttcacaaggttcccattcgagaacatcacgttgaaacgcacacactttttaacaaatctgtgaaggaggctgtaggcattccgtgtgttctggggctgctgcaagctgggaaggccatccgtggaaactgcccgagaattccctaccatcccacagcaaggatttggtggtgagaggcccagggggtcaggaaaagtagtaaggttaaggagggaggagctaaaagagggaagaaataaaggaagagatttgatttttgccagtgccttcacccttctctacttccatacaaatgtggtataataaaaagcaaaaggctgttcagcattcctttggttccacaatgagcctgtggctagaacagctgcacgccacgctggttgagccctttctccagagttactatgtcctctcgaagcagcttcccctgttgcctgctttgctttttccctggaggcctggaaacgctggggttcttgccgccctcggagcaggcacgttgtactggcaagagtttgacttgtgtgactcactcggaggcctgtgcttcgaggcacgccttccttctgtgtagcaccatggactaagtgatcgcacctttcagctgatcctgggcctgtcactgggttcaatctgggagtacccagatcttgcagagcagaaatgaagccaggagcctggctggactccagctgcacaagggcacctgtcggcatgttggggtcctgcagagacctgggtgtgcaacatcggccagggcaacactagccacaggtggatgcgcctagcacgtccgtgcccagatgctgccgaggagggtgtgacatttctcatcagcttccctttgctctgtgagtagctatctcctcccccagttgggctgaactccacagccatccacagagtcttcaaaacaaagcagaagcgtctcctaaccaccctgagtgacctgataacactacaggaattcttcatgtatcaactgtcttgcaaaagagacaggggcctcatataaggttgggctttctgaagttgagtcagttgacttcctgaaagcgtcagtctcctcatctgtaaaccagagatcatactcctggcagatgccctgagggtctctggagcctttgtgggacatttgggaaagattcctgagcccaggagatgaagggcagtgaggagcccagagggacctgcatttttcgcttagacaggggcactcctctttgccagaagtactgttccatggcattgaggattcgttacatacccactggcctgtggcagggttactttgagcgaaacttgctttttgcagaacggacattcaggtcttgtagaaaaattttctggcaaatagacccaaggcgaagtctatggaatcatatatgggataagatgagtcccccagttagcttcttacagagctagaattagttacggttctttgatggtcagactaaaggaatttgtaatgctctggtagttaaagttacagacgatggaatttagagatcgaagaggaaactgagttgtagagagaaatccacaggtggcaaaacataccagtgtgagaaccaactgaatagcaacatgcagggatcttgattccatttaatcgtcaaggaggtaccaaagcggggagttcaaagtggcgacctaaagacactcagcttctcatcttcaatgatggaaacatctcatgggtcttttggcaacacaaccccaaatagccccaaaatcccacccaggcgggaaagatagcagctgaaggcatcttcaagttccatcccatcatatctattggagaaacatcgtttctctactgcctgcctgcaacattaaatgaccaatactcatagggaaagtctggtgaactcatgactcctgggttctaatatggcaattgtcactagcaggcacatcagcaacacaaagacaagttcagcagtggaggtggctctataacttaaggagacctggtcacaagtcccccaagagcccagtgatcctagaataaagaactcttcacaaacatgcagagccagaagaccatcctctgaagggctgcagcctagagttcctcgtgtcccctcgcaccttcatcagctaaggtttccaagtgaggccaggtatgttgactcttcaggaagaagggaccagagatggatggcacctgcttgcccagtgatctcgatgactagggactggggaactacagcctccttctgacactgctaaggaaacagatcaatacttttcaacatcccctcaccttttgcaaacaaccagctacaggttttggtgtcatcagggcaacttcccaggcaagaggattttctgaagatgattgagtcctgcttctttggacacatccctcatgaggacctgcaggaggaaattaacacaggccacattgggttttgaaagtcacagagcctcatgagaagggtcaacccagcaagggatgtgcgatggacctttggggtgaagggaattgatttctcatagctagatgagataatcaaactggcttacaaatttaccaatcacaactactttttggtcattattaaggcttgatatgcttctcagaatcacagagcacctttgagcatatgatatggagtcagttaacacgttttcactaacccaaacacactccttcgtatcttaagcccctaccgtcatcatttgtaccccgcatacttggattgtgggcttgctgtgtagcatctggaaagtggaatgtccaggacctgctgcttccttctggcagtgtatatgctgagcagatgggttctggggtgatcgccttcgtgtttgtcttgtttgaagatttctatcctgtgtggtcttcctggtggtatttccacacaagcatcagcactaacgttttttctctagttcctcgcataagctcacaccacggagacaaaccatccttagaacattcaacattcaccgcattgaaacgaaacttacagaatgttcactgccagcaggacacattcaaaggcatgattactgagagcctgtttccagcatgccatgtgcacgccctgcagctcccccaatgtctatgagaagcttatttgcacaatttgcctctagtttcccagagctgcctccccttcatcagaacccaggcgtcccctgctccttccctgtggtttgaaccagcagaccaagcattgcgcagcagggagacaataatgctggcaacgtcaacctgaattcattcttcttctctttcactcgtcaaagaagggccttttatttgaatgcaacatctgcttcgtctctgttgtgcaagaccagggccctgatgcaatgcccccttctcaaacaccacagccaggtgacagtcacacctgacggtgacaggatgaagagagggagccaagaggctattatgtgtcaaatctgataggatgcagaggaggcgttacagcatggaagggtgggttttagaggagggcgctttccacaggaggaaaaaacatcaggctacagtttcctcccagcataaagaacagaaaaggatggggaagttaggctgtaacacatgtgtccagtgttgccatttaaaagcttgtaacatcaatcgattgcagttcttttctactgctatttatcaactacagtatgtaaaacgagcctttaccattttatgagtacagctacaaggagattgttattaggagatgggcagaaaccaataggaaaggtgcgcatgagaatgatcaggttgagactgcccaggacaaaggcggctggatcaatcaaatctgggtgcccaatttggaacagaatcatgttagatttcatcaaatattttataccataaaggaacacattctgttttcctcacgtttggaatagatctttattgtgtcttttgaaacattatgttttttgttctgttaatcacagagaaaaccatgttttcccctcagtattttcaaaatttggtaattcagattaaaaaggacaaaaaacaattaaatgcatattagacctaccttaacttatttgtagcagtaaatgtgaccttacattctaagattatattgggattccagaattactgccatcattgcagtatttcacaatctctattattattattataacagaaaaggctagactaggggttggtaaactaaggcctactggctcaatccagcctgcttttgtaaataaagttttattggcatatagccatgttcactcacatactcagcctctatggctgttttcatgcgacagcagcagagtttagtagttatgatagaggccacgtggccttcaaagcctaaaatatttactattcgcccctttatagaaaaagtttgccgacaaaatatcatgcaatagacaataaaatagtgcagtaattcctccccttgattagatagaaattttgtccttatgaagactgctttgctcagttgtgtgttgcgcgtcataaactcactcagcattcataagtcttgaaaattgcaaaatttagtatcactgtttttacaggtgtcactgcctaaggtaccatgttttttgttttttggatttttttttttttttttgagacagtctcactgtgtcacccaggctggagtgcagtgatgcgatcttggctcactgcaaccttcgcctccctggctcaagtgaccctcccacctcagtctcctgagtagctgggactgcaggcatgtgccactacatccggctaatttttgtattttttttaagtagaaatggggtttcaccatgatggccaggctggtctcgaattcctggcctcaagtgatccacctgcctcgaccccctgaagtgctgggattacaggcatgaaccaccatgcctggccaaggtgccatgtttttttaacctgatttttgtttttgtttttgttttttttgagacagggtctcactctgtcacccaggctggagtgcagtgccatgatcatggcttactgtggccttaatctcctgggctcaagtgattcgcttgtctcagccttctgagtagctgagatgacaggtccacaccaccatgcctggctaatttttatttcctgtagagatgggggtttcactatgttacccaggctggtctcgaactcctgggctcaagcaatcttcctaccttgacctctgaaagtgctgggattacaggtgtgggccaccacacctggccctgataatttaaataaggaagtttactagtttttctgaaagttggaaacggcttccaagatagttttattaatattgttcctgttcatatcagttacaggaactctcagacaacacacacaaatcacaatctgttaagtcagccacagaaatctacacagaacaggagggttatctcctggtttgaaagttgttttctcactgcagtgatggtttaatttgtcaggtgaagtcacaactcttaggttgaaccataggacattgctgttttttttgtttttttttttttgtttttttttttgagacaggatctcactctgttgcctgggctgaagtgcagtggcacaatctcagttcactgcaacctccgcttcccaggtttgagtgattcttgtgcctcagcctcctgagtagctgggattacaggtgtgtgccaccacgtctggcttttttttttttttttttttttttgtatttttagtagagatggggtttcactatgttgcccaggctggtctccaactcctggcctcaagtgatctgcccgcctcagcctcccaaagtgctgggattacaagtgtgagtgcttggctcattgctgtttttataagtaaaaataaaaactttgctatcaataattttatatggcttaacctaacatttcaaggatttttgtaaacattaacttaaaaattgagttaaagacagaatataactttaactcagaattgaattgtttcaaaagtgtgttaatttaatagcaacaagcaccttcctggcaactgatgacctcttttaattgtgctagcgtttgagcatttggaggatatagatcaatgtccaccaatgagaattctgctctgattagaggttcacaaccattacttgaaacttttttctaaagcaggtttctgaccctgtcccatgagcatctcccttacagtggtgctggtggacaacgtgttgtacttctgtagtatgtatcatttagagccctgccactcaaagtgtggctcaaggacctgtaagtccacatcccctgggagcagaagtgccagccatgcttcgggcctcctaagtcagaatctgtattttaacaggatccccagggaatctctatgtccgttgatgttttacaggcactggttaaaaatttgaggtcttggtcatagagtaagttctcccagttgttgccccagtaaatttggcctcggaagggttgatggcttgggcaccaacccagggacgctaaccccaactcacgatgggttcataacaatgctaacagactaaattcatattaacattttaaggatgtttggtagcaattcattaaaaattgagttaaagacagaagataactttaactcagcaactttagctgaccaactttgcgtggtccaaggtcttcatatgaattactcagtgagttctcacaatgcctccaagaggttggagccgtcattaccctgtgtaacatctgaagaaatggaaggccctgtgaaatgatgtgggctgaaagtgcggaaatttagttgagatcaagaaagttcataaagagaaacctccaaggcagcaattgctccagtgtgggagaattcaaatggacagtgaaataccggggccttggttccacctacttgtcaaggggctcctacagcagggagtgcaatacggtggcccaggaacatgtatggttctcagtccagaccgtgaaacagttgatttgtgctttggcaatttgactccaaaataatgggctgaaagtcccatccgggagagagagcgagaagccaaatgtaacatcatttccagttatttcttatcttacgcattggagaaacttgttatttctacatgacccaacttgcaaacacaaataacagatgctggcgagagaactgggtaaatttagtactgcgtgatgttaactacggctcacactggtatctgcgtcgtagcagattctagattcgacaccactttttgctttgctttaacgtgctgcagatgcaaactgtaagagaggcaagaattcactgtgaatggtggcgtcgtaagcagctccacagtgaggatattgctgaaagttagcttgcccgggccactttcttttttttctttttcttttttcttctttctttttttcttttcttttttttttttttttttttttttttttttgagaccgagtcttgctctgtcacccaggctggagtgcaatggctcgatcttggctcactgcaacctccacctccccagttcaagtgactctcctgcctcagcctcccgagtagctaggattacaggcgcacgccaccatgcgcctgccaccacgtgcccaggccacgttctattgaggtctctaccttccactttggttctaaaagcacttgtttgtagaaatcacttactattctacacctgcaagcaactgaataggccattccagaaccatggcaaccagcatgagtggcagaaggaaaagtctctgagcacagggtttcaggctctccctgcccacttttaacatcagggcagcagagggactcaaatgggctggacctaaaccctaactctgagatgcaaagtctagtaatatttaacaaaatgattcaattaaaaatttaattttatatctcaaagagagtgccaatgtttcagcttcaggaagtgacagattttgataatcctagcaggtcactctctcttccgccgtggtgagatttcatgtgctcacatgcaaaagaacccagccccttctccagcatgctggggctgttaggggccaggggtttggagcacaaacgcctgctttcatcatttcatcgccaccatttttgggtggccatgggcaagttattaaccctctctgcctgttttctcactgataaaattaggaaagagtagtgcccacctgtagcagacatttactatgttttctgcctgccccatgccttttgaatacccttcttatgctcagctaattctctatccaatgagttctgcctccttaaggtagaatccagaaacttgcttttccagcctcccttgcagctaggctctgctgtaagggaatggaaaatgtgctgtgcattaagaccaatgtccaacagaaaggagtcaggtcaccctgactcggattggaggtgcctgaccactcatcaaatgtgcccctgagatgtggatccagaagagagacatgaaagaggtggcactgggtgcagtcagtgctggggaggggagagcagaggcatttgtctcttggaggtggctgtggtgaaggcccagcgttgtaaggtgagctgccactgcacttctctagcagggcaatttgagtgttgtttctagatcttttagtcacaaagcctgattgtgtggccctcctggacataaagcaaggtagccaagagcctttaataaattatttatctccttcagctggctaaagtggatttggctgtctgcaactaagtgtctcccaaggccactgttgagattaaatgagttactgaggtcaagtgctggtgagaactcactcttattacccttgcaaggataggagtgaattctgattttattttactttttatttatttatttttttgaggcggagtttcactcttgttgcccaggctggagtgtaatggcacgaactcggctcactacaaccacccgcctcctgagtccaagtgattctcctgcctcagcctcctgagtagctgggattacaggtacccaccaccatgcccagctaattttttgtatttttggtagagatgggggtttcactatgttggccaggctggtctcaaactcctgacctcaggcaatccacccgccttggcctcccaaagtgctgggattacaggtgtgagccactgcacccggctgaacactgattttaaattgtatataatctcaatgccacctggtgtaggtttaaaaacacttctgcaaaccctttgacatgcctcccattgtgaagtgaagtcttacctccctcactgccccctccaaaactaagagggcctttgtgacgctttctcaaataaaaagcagtagaagtgacactgtgtgacttctgagactaggctagaaaaggccaagctcaagctacacacagagtccacatttaggtgttctactgaggccgagctaagatctcagtcaacgaccaagccccagacatttgggggagcaggtgagcccctaagatgatgccagccccctctaccctaacatttgcatgagacagcccaggtgggaacagcccagctgggcctgctcaccccccagagctgtgtgagactgtaataaaatgatagtggttgtttttagccactgagttttggggtgatttgttatgtagcaatagacaactgatatttattactgattcattagcaatagataactgatatcaggaacacacctgatatcagtttttcagtgctctctggcttttagactgcctgagtgtgaatttttatttttgctccagggtctcactctgtcacccagactggagtgcagtggtatgaacatggttcactgtagccttgacctctgggcctcaagcaatcctcccacctcagcctcccctacagctgggaccacaggtacgtaccaccatgcccagctaatgttttattttttgtagcgatgggtggggggggtctcactttgttgcccaggctggtctcgaaccgccgggctcaggtgattctcccaccttggcctcctacagtgttaggattacatgcgtgagccactatgcccggcctgcatgtgaatttttccatttggccttcacaacaatcctttatagattatgattcattgatttgtatattaagaaaagtctgaatgttgaatgccttgccctcaatcagaaggctcttcatctaagacatagagagcagaacccaggtgtctggctccttgatgtagccctccacaaaatgaggtggtctcggttcactagtagaatgcactgttgtatgtaaatgccttctgtacattgtcttgaaaacaaccattaggtcaatgtcccaagcactatgactgtgtaacaacagatctccccaaaactgagcatttacaacaacaacagagatttattatatctaattatttgtgtgggtcaggaattcagtagcagcctggcttggtggttctggcttggggtccttcatgaagttacactgagttttccactggggctgcagtcaagtgaagggttgattggggctggaggatctatttccaagatggctccctcacatggatgctggtctctatagcactgcttgagtgtcctgacagcatggtggctctctccaaagcaagccatccaggagaccaaagtggaaactgtaatacctttatgactaatcttggaagatatatcacttttgctgagttccattggtcccacaggtcatctctgaatcagcatgtaaaggaccacgcataggtatgaattccaggaggtgatgattgctggggcaatccttgaggttggctaccacaatcagtactatcgccccaagtcccaggtgaggaaatgagccagaatgactagggaatggccgctcaagagtgtgtgcaggtggaatcggaagccaacactgattcctaggaccacgttcctctccaatctatgacacaaggtgaatttgtggtgtattttgatgcatttatgttagtattttcaaaaatttcttcaaaattgagaaattctttggaacattatcatgaaaagacatacggtgtgggcacactgattgggagtcctcactttggtcaacaaatgcctcgttttgtcatggctgaaattatgcctttttcctgggtgccccttaaaatttttcttttcttttcttaagctgttgggtaatttactgagttatcctatacaaacatgggaaaacatgggtcctagcttcatttttaaatataactccaaaaccgactttatagaattcaaaagtggtcaaataatcaatctattaggactataatgactgtctcagttagcttgtgctgccgttaacaaaataccatagactgagtggcttaaacttaaaataataggaatggcgtgaacaacaggaatttatctttcacagttctggaggctggaaagtctaagatcaaggagtgggctgatttggttctccagtgaagacctccttcctggcttgcagacagcagcctcctccctgtgtcctcacatggcagagagagagaagctctggtctctcttcttctaagagcactaatcccaccatggagaccccatccccaggacctcatcgcaacccagtcacttcccaaagatcccacctcctagtaaacactgggggttagggcttcaacatatgggtttcgggaagacacaaacattcagtccataacaatgacatatactctctgactcagtaatttcatttttttttggaaatttatcatacagaaataaaagcagcagtgtgtcaggatataggcgtgctggtgtttattacaggtgtctttgttatgacaaacactggaagccaccttaatgcacagatgggctgagtaaattaaggtacatctgtattaaggaataaaatgcaactacggaaaatgataaactagatggaggggtgcctatgacactgtaaagtttaacaaggatgttgtagaataatgtgtattgtatgatgctatttctatgtctttgcattaatctggaaagaatgttcctttttttttttttggagacagagtttcactctgtcacccgggctggaatgcagtggtgcagtctcagctcaccgcaacctccgcctcccgggtttgagcgattctcctgcctcagcgtcccgagtagttgggactacaggcatgagccaccacgccctgctaatttttgtatttttagtagagacagtttcaccatgttggccaggctggtctcgaactcctgacctcaagtgatccatccgctttagcctcccaaaatgcaggattcaggcatgagccactgctcccagctgagaatgttcttttgaataacctgcttatcagtcttagggagatgggggttggaatagaggcagatcattatttttaagagaaaaaagtatagaacacccgatgtaatatacaaatttgtactttggctatttcattaaaatcttgatcattagtaaaaaaaagaaaaaaaaaaccttccttgattaaaagaagctcctgatgtgagttttcccaccagcattttactctcgcctttaggttgaaactgttccagggggtcacttttcctggtgcctgaaacgaagatccaagatttccccaaagaaagctatagaaataactgtttccactgggcccataatcagccatcaacatggaggacaaaatggggtgacatttttttaaaaggagaagatgataccattaatgtaccgcccttgctggttcccactgctccgagacatttgccgcaggcgctctgcaggtcgggcgggagggagactgctattgaggccctctgcacttagcccagcggccatttcttagggaatattgatcaaaagtactctcctctatcatctgaggggcataatgcagtccctgagtattcacggaaaaaagcttttctttgccaggctattttctaaagtcaaaaagatcctttcaggatctataatagcaagccccttcccacctcacgccctcagtgagaagcacactccaatttccaggccctgaggaccccacgccaaggaggaagccgagggctctgacctcttcatggaaaatattccttgtcaaactcaacaagcattttcacgggggtggggggaacataaatggaagattagcaatgacacctgacacataaaaaagtgccctcttgtcccagagataatttatgcatttattctttctttcctaaaataatgtttgaatagaattttgaccacatacgtaatgctctctgatatctgaggtaggaatatcttgatatataaatagcaacaacgacaacaacaatccgatcagcgctgtccatgtctgacatggtacggagggaggatgctagctgggacctactttctcactctcattctgtgaaacacaagatcttccagacaaatactgcctgatgtgacagcttattataaatgtctcgctgcccccatcttgtccaacttaggacacttaggtattaaaatacttataacttaaaattctaacaatgacaaaaatgaagcaatcgccaattccagctatttttttctcattattcagaaagagtgtcattttggagagttcctgctgtttttatcactgctgtttgtgtgtgttgggggcagatctgagagcacctcgagggcagagagggtatcactgctgtttgaaatgcactgcctagctgggctgccggctgttctctgcgggtgaaagtgcggttgaatctgcagcagactaagaacagacctcggtttcggaagtgagtctcattctactccactcaaggtggttcttgtggcatggaaggacattgatatgtctttattgtctcaaactcccgaaacagaaaacattttcaggagagaaacgagacaattttggccaaactgtatgtagcaagtgcttggtaaacgtgtggatgtctgagtgcagagagcagaccatggtcttccagagcgtggccgacctgcctgggcatcacatcaagcatgaaaaacctgctttggctacctgctcttacctcaaagtctatttttcagagttgaagacgagcaatttttctttccagaggttccagtccatggcttctggagccagagagaggttaactccagcgttttcgtctctgcgtgtagggagagtaggtaagtctcttgttaaaacaggttctcccacactccaagcccttggtctgtgttgtgcctggtccctatgacagcagggtcagggtggcctaagccttggcattaggggacctttacagtgaccaaaaatgcacgtggaaactacattttcaacaaacagtccatgcactggtgaagaacggtgattgctgctaagtgggggtgacatcaagaagtgggaaccggccgggcgcggtggctcacgcctgtgatcccagcactttgggaggccgaggtgggtggatcacgaggtcaggagatcgacaccttcctggctaacacagtgaaaccccgtctctactaaaaatacaaaaaaattagcctggcgcggtggcgggcgcctctagtcccagctgctcgggaggctgaggcaggagaatggcgtgaatccgggaggcggagcttgcggtgagccgagatcctgccacagcactccagcccgggcgacagagtgagacttcgtctcagaaaaaaaaaaaaaaaaaaaaaagaagtgggaacccagaaactcatctcctgcctggagcctcactttctgaccttgtgaatctcagtgagccaacgtcttccggcctcagttttcatacctgtagaaggtggtcagattgtgggggtgggggcgacctttccagctgtagatccgtgccttgagtaaaccaaatatgcagggacaaagtttactttgtgctccatttccacggccttcactttttggtttgaaaaacaaaatgcaactaaaaccatttccagatatagacaaaagagcaaatgattagtgtcccttgacataaacggtttaataaaccaaagtggcctcaatttagtttctgcacatacacggcaccataatgctagcttgaatgtgtactgaagtgaacaaatatcagtgtgtgagcctctcgctggaagacacgcttcactgcaggaggcataaataactggcgcttttttttctgaaacacttagacatagtcaagaccacttgactatggttaggtgtaccttaaaaatattctttctttcaattctggtacctagcagaagccccaaaagacctatcagggtcttgtaacaatggtccttttggaagcactgactatggttaggtgtaccttaaaaatagtctttcaattctggcacctagcagaagccccaaaagacctgtcagggccttgtaacaatggtccttttggaagcactggaagttggattgttctttggaattctgctgaaggtttggcctaatatggcccaagatttgatgagtacttttttaaggtgacctgatcacttacaggaggcatgatggaccagaatgtctccccaccctctcatcattctgcaagaaataaaatgtgtggcagagaaaacgatttggtgaaaacaaaaacaaagatataaaaaagtaaactgtttaagactttgagaacaatatcctttgaatttcaaataaccatgtccatatctgagaagtatccctgaattatccagggcgggggcatctccagggagattatccagggagtcctgagggccacctatgacgccgagtcattagtgagtggcagaaacgcagctcctaggagcagctgtagagcaaagagctgtcctgcaggtagtggtctctgatgttccctcagcgcaggcaggggatgaatgctgcccagaccatcgctgatggggctggcccagatctacctgtaggtcagcgtcctctgggtagctttaaaaagtggagatgctgaggttctagcccagacctggtgggtcagagtctgtagcagacaggaacctgcatttgacttacacagattcttcaacgctgctgacgcacaggctgggacccactgtgtccaagccacaaagctctaaaactccacaacaagcttcatgtgatgaggtaccaagtattagaagcaggacgtaccatcaagcaagctcttgttatcagtgaaaagctaaacattgaatttagggtctgcctgactcccaggaaggcatccagaccatttgtgaggtcacagccatgttttgtaagtattaggtactcaaaatatttgctaactggacaaatggatgatttttacagacttctaatacaatgtcctgaaaggtcactgctgcctagcccatgagtagcccacgatgctggcagaggccacctggccaggctgtcatgcgaaggctggggtctttagacgggggcatcagcccggcttcagccataccaccaggggactgttaccacaccctgtctatcacttactcacacagacaagccctctaaggctgtctcctgctcatcagggataggggctcctgaccgctagaagggtggctcgtatgggggctgccctggagagagacggagcaaggggcacagctcattgtgggctcggatggacgttgcggtagcaggtgatactgacccagccctttaatcatgaagagagaaagcgatttaagtagattagaaccatgatgcttggattcagagcctcttgtgactggatctcagcattccatgttaggaaacgaggtgaattttacataaacatgttggtaagcttccccgcattggtaccagctaccattttggatacatgtttaggctttggttaaaatatgctttcacacaattctgtccaataaaaatgaaagccacctttttattagatgccagggtgaactttattttcttataaactataatgagaatgagagaaacatatagcactgaagtgctgtgtttccactttattaaatcatcacagtaaatcagaattaaagagtaaaagaggttaactggagagtcgggtggctgccatcagtggagatgtgtgctttctcggtgtggctgcctgggccgcggtgtgtcctggtgcacacacgtctgcaaggtgttcccaccacctaggaaggaacctagatgtggagcattaggaaaattaaataacaagagacagcaaaataagaatcaaatgacacgctataacttaatttaccatatttatcaaattttttccttatttacatgtactaaacattgtagacctgaaaacataaggaaacattcacttcatgtgtatgtcatatggacagactgagtgcaactaaaacgatggttgtttcatgttgaatttccctcggatgcagacgctgcccttcagtagatataaaggtagcacagttacatttacgacatcacagttaggttttaaaggattcatcagacctccacatgacaccgatacagcaggtccatggggcgcaggtggtgccacctgaggaaggtcaggaagacaggatgtgcatggctctgtggatctgcatgagctcttgcttgtaaggctgagggtctgatcaatcaacctatgtcaccaagtttgggtcaccccacttccccaacatgtggctcttaggaaccgcagactttgttgctgaggcaacccaggctaaatttcttcacttctgtctgctgaaggcttatttttaaaaagtcataattttttaaagtacgaaagcctaagtacaatgagacgataaacatcagctttgctctggatggaatctgggaataggtgtgcagagaagtgagggaactggcctggccctgcctgaggccagcgagtcttaccacattttggcccaattagggccacttctgtttccagatggctgacctactggtaccaccgtgatgagtcagcgctgtgcctcaggtggggccctagtggatgaatgatcctccgcaattttgctgaaagggatttattacaaaaacacaatatttgcttttctaagtaaaaaaaaaataaaaaagaaacttgatcattgcaattttccaccccagataacaaaaacaactccagtccacgtgatcacgagaaacgtggctgtcagattccctgctccacgttccatctccagaccaaagctgctactgagaatggcaggctcaaaaaactctagtcaccaaactgctggctgtcatcgggggtcatggggtcgttataatcctcaggggttacaggagggttgagttatttgctgcctacaattgaatttcccaccccaaggtagggatcgctggttcgtgaaagcaaaatgaaatcatggagcagaagtccaggagagttcaatacgatttctaaatcctgacatatcttttctactaaagccagcaattccgcaacaggagtttctagagcctgaagatgaaacgttctcccagaggcgacctgctggtagagacctacaggggactctggagcctaggagcatgcgatggccttcccaacaggagtgaggtaaacaggagacaggagcagctcaacagcaggatcaagcctgagtgatggtggccaagctatgctgcccagatgtctggaatcatttaaaataaaggggcatttgctgacaccacagaaaatgccaggacttgcagtcactcttcacattgcccttcagcccccgtgagtatcctgggcccttcccaaaacggcccaggggccagaagcttccttccactttggggcaccctcattctcttctgttcaggtggttctcaaggtgctcctgtcagtgggcctggcctgcaatcccctataaagcagaaaagcaaattctcgccaggatgagcaggcccgcccttccgacaggaacgactggctcagctctttctcatttgtcccaagagtgagtctggctcctgagtctccccgttttccctacaaaggccaggttccagccaaaccagctccatggcaaatggaaaaaactggctcctcagtgaaaatggccgttctgatggggtgagagcctcagaaggcttcttcaggcctgggtggccaagcagcctgaaggtaacaagtgtgtgcaagggcagagggcagagggcacaggaaggtggggaggcctcccgcacagggcccgcctttcccaggaccagcccacccatcataagccctgagttaggggctgcgtctctcgtgctgctgtcccttcccactgcagggcgttgctctgtacctggccgctgtgagaacaaagcctgcgcagtggcgatggactctggtaagcttcttggatttacttcccaagtgaagtgcggggtggagcaaacctctagctctgaggcaggtcaagggtccaggacacagcctggggcctgcgccagcagctcttcgctgctgactgatttctctgctgcaggacgggcaaggcccacccagggcgccccagcaggagagggctcaccattgcttctcttttcattcattcattcattttgtttttaagaaaaaaaaacaacaacaacaaaaaaacaggtctaataagccttccttggagccaaatgggcaaaaatgtaaggattaaatccctcgcttggaatcggctaccaaaagctttgtgtgacaagaaacatttctgaggcctgtgtgaggcctctctgggcaacagacaggagcagcaaagttgcagcgtgaggcttttggaggcacaaggccattcggggggtacccgtctcagcctagcgcctgaagccggcatgcgccttttgtgtggatgtggtctgtgttgttttgagccttgggacacttcctgtcctgcaggaacttatgcaaggacaggaccctgtatttctggaatcttctgagtgttctaagataggggcatcactgtcatgacctgaagcgcctctgcgtggtgaggagagcctctgcttagttagcgggcgtcaggtaccatgtgggaaaacactggacaactgaggtaaaacttctcctgggcaaaagaccccggggaaagccaatttccatgatgatgaaatttttgagtaaaccataaatcctaacataaaaggaactagcaaaatcaatgcagatcagattcctcaattagacaattgttttgccagcccctttgtgaatcatgcttgggttcataaatgagaagaaacaacttggggtgcagaagcaagctgccctctgccccctccctgaaagcgcagaatcttttcctgctgtcatctgcccagagcagccacaccagtgcccacgtgtcagtgggttcatctctggtttttggtgactttttcttttcttctttggaagtccaaggtttgtgaggtttcaggacaagatgatacagcctagtttgagtcccatctgagacacggtagtgggattcaccatgggcttcagaagtccactaatgggaagacctgctgagggcactagtacagcaacgaaatttcctggagattctgggtttagtggctcggggcagaggcaggagagggtgttctgtctcctcctcactcaggggctcttcgaggtcagcactcagactggaggccagggcccctgcaaaggaagcagagaactgctaagtcatggaggcaacggcggctctacggccacacatttcagggaggatctgtggcactcagaagggagggaaactcccaggagaagggtctggtgacctcctcccacgctatgccggcaaagatgtttgttgaatgaataaacacatgaatgtctttcttcttattctttgccctgggcttttctgcagcataaaagaagctatgaatcttgtgaaattaattcagacttactgtccaattcataagtaaagaatgaagagaaaaggcatctggtcacagtgaaagggaggaagagccactgaagaagcagtggctggagtcaatggaaaagcccgtgaaacttcagaggccgctctgcagatccctggcggtgttcctggaatctccacgtgtttacatatcgatattctacacaatgagttacaactcgattattccccaaagggtctaagactagaggtcagtcctaaattgcttgtctgaatgagtccagatgagcatacagctgttcatcactggagggaaaaggaataaaattaaaacctgcacatctgcaccccccgcttccccagggctgctgtcggtgtgctcagaggaatacaagaatgcctgctgcaacaccaagccactgttgcgggtggagctgggtctcccctagcaccgttctgcgagcgagaggatcatttcatcacccttcccctcgtagtgtatttttaaaccctgttgtattatgccccaagtttcctgcatgacctctgctgggaaccaacctcagaagcagagtttccacatcttcctccctgcgtgattcacttgcagggctttggcctttgaaattattattattattggcatttgaaattaatttaagtcagttattttattcacagacgcatcttttttcattctctgaccttcccttattgtttctaggaggagtttccaaaatcaatacttgcaaacgtgcttggacctatggaggcagcctggctcagggtgtcctgaaattcagtactttcagagtccaggggcttcatggttgcctcccttcttctaggctcagtcaggtcgggcatacagagaaggctcactattctcatctttaaaacaggctgcagccgggcgcggtgggcggatcgcttcagcccaggagttccagaccagcctgggaaacacagtgaaaccccgtctctacaaaaacattgcaaaacttatccaggcatggtggtgcgcacctgtagtcccagctacttgggaggctgaggtgagaggattttgagcctgggaggtcaaggctgcagtgatggcttcactgcactccagcttaggtgacaaagtgagacccagtctcaaaaaaaaaacaccacacatgaaaaacctcagaacacaaaaacaggctgcttctgacaaaggcagcacagctagaccatcatccacaagagaagctagattgttacaaggcatctctccatcccctcgcagctggtggtgggcactggcatttaatccagggtgtggggcagcatgggagaacagacttgatttaatcccagacaatattccaacagcccagcccactatggtaatcagattgattctaataaataagcaaaaaaaaaaaaaaaaaaaaaggcaagtaaatgaaagatataaagtgagatccaaagagaaagagcgaacctttgctaattctggattcgaaggaaaacattttagttcctctgccccacccactcacccagggaggataaagagggaaagaggggtgcacctcgagttcctgcagatggacagaggaatgccagctttgtcccgctgagtgagcctggagaacagcaggaagctctgcagagaagggggcctgtgcacctgaaagcagggatcccatggccaggggcaaagggcaaagccacccctgcagctgggctgcagccagtgccacagtgccctacacaggcctctggtccccagctttctgctgggacattctcatctgcactgggccctcgtgccacagcaccccgtggtggggaggtggcagctgcaggacaggtaggcgggacacaaggtacggccgccttcctgatatgacacgtccactcgcagctttgctccactcgcactgcctcctcccggtgatggaagccaaggatttattcacaggacactcgaacctcacctccccactttggcggcaggagcaggaggacatgcatggagacgggggtctcggcaaatgcgaagttttgcagcaaggtgccctgctgggaggggactgtacaacccttctctgccccatcttgacatgagcacctgggctctgaggctcgtgtcacctgttggggctgacacgagtgagcccagtttgggacaatatcaggactgggcttaagccttgggtgaggggaagagaaagggcagctggctggagggtcggctggctgtgatgctggctgctcctctggcctgcaggtccaacagccctgcctagcagaggagggtgaaggtttggataaaccaacaaatctggaccctaacatcccacttccatatttactgagacaaagtgactggtgtctgtgccttgcattccactgtgggcgacaggctcaggaacggcagctcgctcacttgctttctcctgtgaatggcattgccgtgatccttgtcattaccaactgctcgccttccgcctgtgagcctgggaggtggtgcagcccaggccacacgggacagggttttcagacagccttgccaaggcggctgccatccatcagagcgctctgggcagggcctggaccccagacccaggacagaaaggcaggctggggaggtcacacctgccatggccagcctatcctctgggtcctagaccgcagcccattcctaggtctccaccctctgcgctcccgcagcttttgtccgcttttccttccccagctgttccattcagcagcccccgccacaacctgccctccccgcatggaggtctcagaggcctccattaaggctggcggtcaaaggccggcccagcacgtgccgtgtcttatcggcccatctcaagaccctgctccttcaggcctgggcaacaaaaaagggggcggccccagcgcccgctggctccctgcagccccacacacaaaagggcaggcgacaaagacattttccgggatggcaggtgttggtgtcggattcctccccgagtgcacgggcagaagaaaggcaaggctgggcttccccgggcagcgcagacatgcaggggcaggagtgtgggcagggcccccggggaggggaaggcccaggagggcgaggagcactgatgcagggtccgctaccgagggcagccgattagaaaagtcccaccccctccccaaagcagggtggctggacaaatccactgaagtgtctgtcttaccttgctcaaatattgaaatgagacctttacgtgttttaatctgaagggaaagaacacaaaatggaatgaatacaaacacaacacccccacagctccaacttgataactaacacagtgctaataatacatttatccctgagctgcccaagcatttctgcagccttgtcaatcagtaaaaactgaacattcacttgaaaattctacttgataggacaaaatacaagccgatgtcgtgtttacaaatgtgaaatgagagagacattagaactcccaggatctacgcatgcagaccttgtcaggatctatgcatgcagaccttgtcaggagccctacagatgctgaacagcactgacagctatatcctttccctgctctccaacttttcctgactgattttgtttaaaatacaaagataaaagtgttttcaagacaagcatttgaaattcaatggatgacctgaaaaaataattgaaaccccctaggtgggcaagtttacatgtctccaagtttcattttacaggtttctgagttatacacagtgtgttaatactggtgtcacctgcaatatgacagtccccagggagggaacacacagcatcctgtgcagaggaaagcttgggagggttccctggagtggtgaaattggaccataaggtcactctcacccacagagcagcagggtctcagtagtcacacagaactgagggggattttagcttttctatgccttgtgacaggttcttccaccccttccacgccatcctatttcctacggcggggtttccttggcaaatgcatcctctttctgcgtcaggcagtagcttctcctgaactctcagcccccacaactctcctgaattctgtgtcagtagacgaccatcagatctggacaaaggacatttatcagtgacgtggaccattgtctgcacagtcacagttgtaaacgtggattttctgctgaccccctctgccaaggttgccaaggttggcacagtgacaggggcaaacttctaagatggtggctccagcagccatcaggaggtgaccactaacattcttttagccaaggctccatgaaagaaacgtgcactgctatggagacatcttttccaatctattgatgaaaattgtccctttctcccaagaaaattatttggggttaggagattctggatcagtaactgatcgtgggtcgtgtatgatccttggtttgatttccaaccaccgttaacaccgttccttctccacacctggttgtgctctttgggcacaagaggttctgggctgctgctgactgttggtcatgggctagaatgttttccatggatcctcgggatgattaatcatttagatttctgatttccccccaatgtgctgtgctgaagggcccccatttcctctcatggaagagggcaaacatagagcatatctgcgtgggtcttccttgagttgaggaagttcggcttttagagcaccatgccactgacaccctccagtgtgagcaaagggtctctttatgaaggcgctccttgatctcactcctctgcagcccctcagccctggttatgctgtgcgtacaggcacccgattggtagaaaccaagaaagcagatggcgcagctaacaatggaggacttgtttgtaattgctgatgaggactgggttgcccctctcctgtgcatccccagacgcagcctggtgtggtgtgctggaccacaaagaatgtctcagtaactgccaatccatggttgagttaaggagatgcaaagacagagacagttgggggctgccttgattattccatggggctcaaatgtcacttgcccttgacacacggcggtgctcccaaagggtggggttccagtcgtggagcagaggagtaagctgtcagcttcctgatacatctctggggtacgcacagggcactgaccaacctgggcagtgtggagggcacctggagggcaatgtgctcggagatggggggtgggaagaggccaggagggacctgacgtctgggggcgataggggagagacacaaagcctaactgtcctatccctttgtcaaatgagcagcagatatgtgccaggtactgttttaggctctgggttacagtggtgaccaaagcagatgaaaccgctgcctccaggggatctgggagaaaagttacagcatgcagtctaatgaggggatatcaccccttggggtggcaaaatagcctactctttatatgcatacagcacaggtctaagtactgtaagtaaacagatacacagtgtttctgtggtgtttcaggggaggggacaaattaggaaaccaaaatgtctcagaaggctccacggtggggtgataatggataaaaggttgtgacagccgggcacggtggctcacgcctgtaatcccagcactttgggaggccaaggcgggtggatcacctaaggtcaggagtttgagaccagcctggctaacatgatgaaatcctgtctctactaaaaataccaaaaaatcagctgggtgtggtggtgggcacctgtaatcccagctacttgggaggctgaggcaggagaatcgcttgaactggggaggtggtttcagtgagctgggatcatgccattgcactacatcctgggcaatagagcgaaactccgtctcaaaaaaaaaaaaaaaaaaagttgtgacactaggttatagggttacagtgtcttaaatttgaagtcatttttacctatttgtggtgctgggaatcgaagccagccctactcatatctaagagtagttgagtgagactcctcggggacagcccttagcagtttaactcagacaccaaaaggccaaactgtggccaactggcggctcagacacagagttgagccgggggaatccagaagtcacttttgaagaaagatgtcttgcttcttccaccttgtgtgacttctccgatactctggatatcaacagggatttaaagcagcacaggaaacaagaggctggctggagatgtgttgtgttatgtgcggctccgcctagcagaggcgttccaggaattggtgggcctttctatggcatgctttctccagctgtactcactgggatagcaagagagcaaggctttgaaccaagcttcttgcctctgaagaaaggctgccatccagaaccgccacctgggatgaggctgggcagggtcaggacaagaaacgctgctgcctgtccttggatcctggttactgaacagtcagtgtggaaaatgattaactggttcaagataattaggaaagagaatgattttgagagctggcatggatgagggagagaaacagtggactagggctccagctttaggcaagtgctaaatatcctaccagcaggaaggcggacagagtgggagatcagagagctgtctgggctattcagaccccttggaatggctctgaggaagggaacaggtgcaggcagtggatggggtaagcccacacactcaacactggcaacccaaggccagtgggaattagccagcctaattaacatctccaaatggcccaaggatggcttccagtatttccaatccagcagcagtggctgtgtcctggccctggctctgactctgggtttggcttcctctttctggttgttggtcttgcccatcacccttggttcagaagccgaaagctgggacagctggacaggaagggagggaggaagggaaagtgcatggagcgtgtgcctgtatacgtgctgctcccgtgcaggggctaagtgagcaggtggatcattggtaaaaaaaattttcctggcatttttttctttctctcccatgactataatgtacttgtgtgtggctctatgactaaattaaactaaattataaatttaaaattaatatcttggtgtcaactttcttgttaggccatcataaagaaatgtttccagactctctcactctcatggaacataaacaccaagatttccgctgcatcttagccatgggaagtctgtgtactttaccagactgaattcacatgagtgagtggccacagaggacccgaacattcacagcagcaatattcacagtgaccaaaagtggaaacagcccgaatgtccatcaactggtgaatggaccaataaaatgtggtctatccgtacagcagaatatttggcaataaaaagaaatggaataccgatatgggctacacatggaggcaccttgagaatatgctaaaagaaagaagtcagccaccaaagaccacatatgggatgattttatttatatgaaatgtccagaatgggcaggtccatagacacaaaaagtggatttgtggttatttagagttgaggagtgggcggggagaagtgggattgcctatcagcaggctgtttaaaaggggggatgaaatgttatagaatttgattgtggtaatggttgcataacctaatgaatagaccaaaaacatcgacttgtatacttcatgtggttgaactgcacagtatgtgaattagatctcaataagctggtttttaaaatggcaaaatggaatagaaggtggtctgggtggcactactattcccatgattccaaaagtgacacaacagaagtggctccaagattttagaagaaaaatcccctggggcacccaggcaagcaggggaatgagggcagctgtgaggttctgtagatgccaccagcacctctcctgctgtgccaccccccaaacctcacaccaccctcaaagcaaatagggccaacccactgctggcacactgcttttcagtgacttgttttcccttccagggtgtctcccaagcttattctaacttgaattgatctgtcttaaaacaactcaggagtgaccggggcagtgaggtgggattactgtgtgatttgtcccaagatacactgggagtgtgtgtgccactcaggactattttttaaaagtttccctaataatcaacagctcaagaaaatgtagcagttagatccatgatgactgtgggaggacagtgagttctaggtatttgtgtgaggtgtctgaggaaacattgcagaagcaatggaaatgtctggtagttttaccgataaaaactgtcttgtccccagaaaggaattttggcccataattaagatacttcctatatgtgaattatttctgtggtgctccttttgaattgcaaagtaggcaaccctttagctaaatttctcagttatccgtgccaaagtggcatggtctttgccactgtataaattgtacaggccatacattctagaaaacagtcctttctgccttcagggagggacattttgccattgccactgaagaagggctcctctcccccactgggttgttcattcctgtgggtgggtcccccacagcaggcacggagaggcagcggggctgtagggtggagcaatgagtcctgtctgagaatggagaggcctaagtgctcgagctctggtctggacatgaccagccacctggtgatggaaaaaccagcctgcctccattcctcaactgtcagagaaatcttgccccatgggaggggggactctggggaaagtgtgcagtaaactgcaaatctctacatgtacataaagaatggtgacagttcacagagagtcctggagaccatttttgtaagagtaaaaaaagctagggagccttgcctcccatccttgcccttctgtgtcactgagttgtttaaagtctcttgaatcactttctgtgtagtggggatggccatctgcgcgattcttcacgcacacgcgtgctcatgaccactggaacttacagggatctgcagggtcttgagggcagggcgggacacgtggctgagctccacgttctgcctgtctgggcaatccaggacaggggctatgttctgtggtgctggagtgagggggcaccgctgagggcccctctagtgccccccagggaatgttcaggcagaacacctattgtataagcataacatctgttcattcaccagacacatatgacatacctgttgcgtgcccagagatgggaatacatggcgagtaaactgtcatggaagttgtcccccatccccacagtgcaccctccccactgaagcctgactgaccttcgtggaagagtcatatcacagcactctgctgcttcacatctttgtgtgctgcccatctcaccagagcaagagccaaggtcttgccctctgcccgtaaggccactctgaccttcctgttcttcctgcccaccctggctcactcagctctaaggaggctgggctccttgttccttgattgtgccaggaaagtccctgcctcaggcccttccacctgctctttcctgcccctccttccttgtcatttctcacacgccgccttttcagggaggccttctctgaccccctattttaaagtgcgcccccaccccaggtgtgttggattttctcagtggcactcccaaggctctttccctgttgtcttttctcctcagtactcttcagctcctgagagcagacactgccgtctcctttcccgtctggaaggtgagcctccagtgaaggaagggctgctgtctgtcttgcccatctctgcaactggcatattcagtgtttggtaaacatttatgggatgaatgtctgaaaacccactttcgtgggctttatgagatgctctgaggagtgaagctgcagttcgcatctacttaaattgtagcaaaggtgcatccctctgtgtccccgggtcttaagtggacctgagttttaatatctcaatttggcctctggcaagttgctagctttgggtaagtgggagaaagagcagagtcagcctagcgggctacagatttccacttctggcctcctccttccttctccgtggtgatctatttcctctgggactctcacatgtgatgctgttgggtcagcgactgtcaccctggtccggagcgcccagcctcacgaagctgcatgcccagatgttacctggaggctgtggtgctaactggagttgcgctgtttctccagctgcttctctgcaccctagggatgtagctagggagcagggcttccctaatgactgcacgtgggctctgggatgcacgctgactgcagagtctacccatacacattcagcagcactggcaaggcaaggtgtgcacacttcctgttttgcctgagattaggggtatgggggagtggaaccttcccaagccatacccatgattccttttccatatcctcaggcaatctcacagatcacacaatcccacacaggagaagacagatgctgggatggtggaggccactggttcccaccacaggtcacagctgagtgctgcgggaaaggcaagaggagcctctgcgtgggggcacaggtaggtggaacgtgtcctctatgcatctggattttattgtctcatattcttgaagtggccacaaaatagaatagggttttccctattctttctcggcattgtctactgtgatgctactaggtttcttgtgtactgagaagtgaatttggccacatcaatgctgtaaatatgtaaagttacttatttcaaatggatgggcatgtttcccatttttaagggattttattccttctgctgtttgagggactttaaaggctaatgggcaaaaaggaaccggcaggtttagttcctgttatcatcctatatcttcctggaaaagggtagtacaaaatattctttcttctttctgtcagaagacttaactgcgaataagagaggttccatttggcctctgctttggtttggctgttcctaaacaggaatttgagcaaaaccactgagtcttctaggaggcccctcagcagctgaggttgtgcatgcaccacctgctgagccaggaggacttgagggccagtcacgattcacaaggaatgtgaacccggggtgtcgggagcttcaggttcttctgaaatacattctcaaggttatttcaaataagctttaattaagagttatttccaaaaattgtctctgagaaaaattcctggtacctgccagccatctcttggcaactgctaaagcgtcccctgagctgtaattagcagtcaggcaggaggaagatgccacctgcacttaaaactctgtaaggactgggaacccagaacctaacgcagcatttcacagaaaaaccgcaccttcagagttctgccaagggaacagattcagtgcaaggtcacacttcaaaatgaatgatctcaggccgcttcttattctgggaacctatgaatactcccagcaccagccccagggttgtcaggagtgtcactgtccccgcagtggctctgaaacatgtggtttctttctctctgctcttctcacatttactatcctctatctttttatttttgtccatgggccttccagttctcagacattaggcaatgtggggaagttccaaaccaactggcaggatgcttagtagaatatctaatacaaacgaggcaagttttcattctcctcaagttgacaaggcaaatggcatggtccatctcagggaaatctcaacccaactggcctaaaccactggctggctatctttttgacatgtggttatagtttggaggaaacttatctgagcttattaataaatagccattttttttgtgtgtggctcacgagtgtctgcttttctccaataagacttcaagcttcacaagggaaggagagacacaggcctgcatgagattcccagagccttagtttgtgttgcctgaagtgccctgcacagtcctgctcagtggcagcctccaggggcaacaaggaccacgtcagagatggtaacatctgacaggtagcagtggcactttcctagccaagcaaatgaaaagaatgcttgtctcatctcttccagagctgacactgaggagagtaaaaaagttttaaaagaacaaagggatgaagaagcacgaagcctaaagtggtgctaaacaaggtgatcgataattccctttaaaaccctcgagaccatctacgaaagcacctcgaatcaagtttcagttactcggtctgtggattcgctggctcctgacttcccctgcctttctccacaccggcttcttatcagatttcttgtcggtggcccactttcactaagagactgggaaggaggggacagatgaaacataattacgagtgtttgctctgcatcttgcatcaggcccacacatctgtggtctagagacacacctgtgctgcttaaagcaacagcctgattcctttctgtcctcctttctattcactcctgttgcatgtaggaaagaaatcccatgtaccagtctctaaagaatttacagtccattatggagaggagacacacacgcaggataaaggcttacatatgctaaggaaaatcaagatatatgtaaccacaagtcggatggcactaaaattaaggcctaaatatttcagagaggatttagggcagtggttctcagtcctgcctgcacgttaaaataccctcagttttttcttttttttcttttttaaaattccatgctcaggtcacaccccagaccaataaatccgaatctagtggagggactcaagcatcggtatctttacagcttcacaggggattccaatgtgaagccagaattgaatcccactgggtcttggtgatggaatgatagctggtaaaaaaaactttctatcaatgttgtaccatctttccaagaagaatacatcttaaattggaaaaaaatcaaagcaaaagtggtcagaatcaagccggttatgagggaaggaagacttgggctgtgtccagaagggattatgggggtagaagaaacatctgtccaaggcagttgtctgtaggacatgtggcaacactttggccagctacagccaagtgtgctgagggtgctgagtgggatggctgagttattgaatagatggtcatataagatagtttgtatttaaggaaaacttttgggtcaggtgcagtggcacacacctgtaatcctagtactttgggaggctgaggtgggcagatcgcttgaacccaggagttcaagaccagcctgggtaacatggtgaacccctgtctctataagaaatacagaaattagctgcatgtggtggcttatgcctgtagttccagctactcaggaggctgaggctagaggattgctcgagcctgggacgggaaggatgcagtgggctgtgctcacaccaatgcaatccaggcctgggcgacagagtgagaccaaaagggaaaacttctgtattatctgaatagagtaaaatttgactctggcctttagtatgaataaagagctggtagctacggctctgattatgggattatcactatagggtgggcacagggctggcatttccatgtgaaatggggaggtgaagattgagttggcactgattccaacttgcccatgaccttcggtggtcccttcctgggttggtcttcagcttgctccaaattaatgtgacagggttagacatgatctttcctgaagtcccttctagttcaacattctatgatgttctttgctggcttcagcaaagttatggggaagctgaacacatacaattcaaaagaagcactattaattaaaaccgtattaagaccactttaacagggagggaatgaatatgaatgtgatgagtctgtcacatgactatcctttcaatgagcggggaaactctttttggtggtttgggttaggatttacttgtgctgtttctgggaattaacttgattattaactgcccagtgaaacggccaaggaagactgcctgtcaggactgcatgcggaatgacgagctgcatatggcgcggaggccttagcaagcaaaagctgggtgtagccatatccctctgggcaaaggctggtgagttctaagaggagtttgtgtagtgtctacatctcagatttgctttggggcgaatgtgtaacataagtgcctccatctgcagttttaggagaagattttattggccaccaaaatgactcagtgacaccaggcagagtcttctggcaaaggttctgcaaacttaacataacgactgtgttgtagaagaaaagctacagaagtctttttcattaggtaagtggcaataataaccctttccacgagggcatccaagcaattgtgtgaaagatgaaagtttgcagttttgtgcagtagcaggaatggcagtggcatcctaagaccgactcagactaatctggtttaagctccaaatacgacctacattaaaagtggcagactctgatgaagcatagtgaggaattttctcccacttgttctaaatcctggagccttgacaatccagcctatcataaaggaggaagtatttctgaccatatcttggagaaatcaaatgctgtgtttatgcagggctaacaaataaacaaagacctgtgctccctctgctggctctctatagcaatattgaagcagaaaggaaccatacgtagtattggcatcttcagcaaacacaagtcagtttgggtattccgagaagaaccactcatttaacttggttttgaacattctttgagaaaaatctatcaacttctgacaaaggcacttggaaattcttaaaattagatattaaatgagacatacctgtagcccttggctaccagattgctagctgtgaccgtaatagtgatctggggattgattgatcaacagacacaagtggattcctccaaaatttttagatccagacacaatctttaaggcagttctgaaaaaaatctcaggtccaatgtaaagttcctttttttctcttttataagagcaacttctaaaaagcaaagatttacactatttatatcttttctgataatgtcaaacactagacttgattttccaaatcattagcatgcagaagaatgacctcatggtgaacagatgcacttggctgtgagctgcagtgattacatcagtccctcccagcagtcgagggtgcccattccagttaaccctttcaaggcctctctgccggtccctctttcttggtgatatgattgaaagcacaaatttagtcccccaccccaatatgtgtgtgtgtgtgagagagaaatgtatatgtgtatataaatgtatttatacataaaacatatatatgttaattgcaaccaatattttaatactggctacattttagattatttaatgctggtcaaaaaaggaaggtaaactatagtgctaggtaaaaaagtagttgaaatatctttacatgtcaggtgttatcaatacaagtaatggatggaatagatacaaggtagatacgatggtctttaaaaatattttctcattaggaaaatagattttgttttgaaagctctttgaaaaatgccgagcgctcatatattagcagctacaccaccatgtgtggttgacggcgcatcctgaacgcaagcctgttcacctggccaacccacccccgcagggcttgttgggcggatgggtaacagcacctggatggggagagtcagaagcagagggcattttccaacagtggaagcttcaggcacaggccattcccaccgagtgcatctcccacttttacttcagacttaaaggctgattttggggctttccctctagaagtgggggctgcatgctgctttctggcttgctgctaccaatacagtgcagaatgaatgcagtgttcaggtgatgctccctcttcattaataataaagtcctggtggtgaggatacaaagaaaacctaggagcccctaattcctcagattgtgcatacgcatgtgagcccaagcccaaggccctgctttgatgacactgagggccagagatggtctgattgggtcctaagtgcactgtgggagcttaagccgctcagggtcaatttttccagttggcttgttgcttggaagaacagacttcacctcaatttcttagtttaagctggctggctcatctgggtttgatcgcccttgtcccaagaacataacagtgtaaacaaatgacaaatgttttcatctgtagaagtagtaacagatagtggacagggattcctcaaaagcgaagccagtatgtaagctagaagatgcttccgaaaacgtgcttgtctatggtgctgaaatgctctgtcctcattgtactgccccacatttcagttcaaatcaagattatatctagttcattcctactcagcgttatgagaagatatgcaaagaattaaaacagaacattatgcctagacttaaaaatcacacttaaggataggcatgatagacgtataaaaatgtttcccactcaacactgaattccttaaaccatgaacactatgaaatgtaatactgatgttaataatttgaaaagcggagggagtagcatttgtcttgatattccatgtttggtttcacgttccttttagaagagttccaatgcccaccctcacatgctgtcagaatcttcattctgctaagcaattttcaaaaatatgacgttcttgaagaagcctattgacaatcctctccaagtagagttcttaaaaactcaaattgctcctagaatctcactcatttctattggtttaaataattatggatgtttggaaaagatcaaattagtttatacagaggctaaaatatacatagaaaacaaagtccatcattattcattttgataatatcttaataatcttaagaatgtaacagttaaggaatgaaaacatctagttattatttacgtgtttaattttaagaagtaaaaagctttctcaagagttaaacaaacaaacaaaaaacaaaaaacaacctgcactgaaaaatcaagtcctcacgaagaggggaataatctcatgagggtgggaaaaagctgaatgagatctttttaaaattagctttgctacagatccctcatgttctttcactgaaaaattagaaacgatttaaaatctctagccagaccgagtatgaaatcttcatttcccttgaaacgaatttgtttttgtcttagatagaatgttggcagagtgtataaaagaattcaattcacagctgttccacttttttaatgtaagaaacattaatcaaagctttaagttataagcttttctcatgttgcttagtattccagttcaacaaagatcaatagaggccatcccagtgttccttgacgcctcaccaggaagcagaggcgtgattatgcaaatcacgctgctcctgcacctctgccagcctgcttatctcccaagccttctgcctgctgctcctggctccctgcgcaagtgcgtgcctctccctcttatctcccaacaaagctctgagaggcaaggattgaggccagcgatgttaaacaatgatgcatggctgattttatttgtaagtgatttatttcactggatttaattttttttcactttgtgtataagatatttgttaacaagtcagaataggagaagtaaggcagtgttcagagacaattgacacaggttagaaatctattaagcactctaacagtttcatttaaagcagtggaagaagaaggaagctcctcactgagaatctcaacatgcattggctaaatatcccatttattctctgaaaggcaattaatctgtaattatatgcagaaatttacaagtaataattctattatttgaaagaaacacacagtaatcacataatctgtttaagtggcaatacatgtatttttccccccaaactggaaatataaaaagaataaaaacctaaaaacaaggaaatctatggaaactttcacaattttccactggccctaataaatgaaaattattgtaagctagtttctaaacgggttccacaccaggtgctgctccggtcggcggcttgtccacatgacacaaaccactccagagagacacgcacactgcactgctgtaatgatggaccccgggacactgtccttccatgtctcctgcattaatccctgaccttcgaatctcggcagcataatccccatttagcattagtagcaacggcttccactgtgaggaactcttttttgataagtaagcactgattcgggcatcgcttttaaacagcatattcccagctcagcaagaaacccacactcctgaatgaaccggagcacattactgagaaaaagttcattaaccttgctagatttgaaggttaacaggatagctgaagaaaggaactgagtgaacagctcgaatacaaaacaaattaaaatgaatgtcatcattccttttgatattcattagttgattcagagggagaatgctcttcttaaatttgcaaagcatttatctgtgaaaaacaggtgtacatctgctgctcgaatgcgtcttaagcgcgtgagagaagaataatgtagacactcacccgttccgctgagggagtagctgggagagggagaaaagacttgggctgcgaaatcctcgaatgtcattacttcgcggtggttctgaattattgcttcgagatacagagctcgctcttcatagctgcggtaatcggttaaggaaacaagtgcacgtgcaaagtggcatgcagagcagtgacagaattcacttttaataccgttgtgcaattttttctgtgtaaaaaagtatcctgcaggttctttaccatcttgcagaaaattaagtattagtcataattcatacccaaattctggttttgagacctaagtttctcttagactttaattgcattaaatactaataacactaaaaaacatgtaaagcaacagttacagaataacatcataagatcattagggtcgatttaaacaaaaacaggagatactgattgcaatagcatctctttccactgacagtggtagatcttttacatcctatttcagtggataaaacattcttagcctactgacatatgagttgatacttcaagcaacttggtgatacgacagtgcagacgcttcttaaaaataagaagatgcaagttactgggaagagagaaggctaggaagatagattctgagggggcatcagagcctctaaccaagacaagctgtgaacattggaaaataagaactactatgtgagagaatctaccaagagtgcacagtgcaatttaaaaaaaaaagactactgccttttaattaaaactgcagtctggaacacacagcattcaaatgtgtaatcaaaaaccagtcaccaataaaacttacaagcgtaacacactgaagcaactttccagctgtcttaataggacccctgcgtgtggcaggctttcacagggcagaaagcaaatcttccccttttgtgtgtggcttctgtttccttagaaggtgaatcatgcacttccaataacaggataacgtcagaacaatcccacaatggatggaggcactgcacatacgacgttatgaattaacacttggggaagtccgcatgacgtctcattttccccttcctcattatcaatgcaaaagttaaaagacatgtttcagtcgttttgaaaatcatgctaattctccgggaacacagggaatgcggatcaccatcagtttattattggcagctccagaagaggaaaagtaactctagcatttctcactacattttcaaactatcttttcaaaatggcctctttaaaaatacaagttggtgacaattatgtcctttcaatcagccttcaagacagcacgtgtttttaaatggtcaaatacttttctgctttcttatggcaaagtgtgcacaccgatctctaaatgcaggctcttcctctccctactccttcagttatattcagaggataattttcataccgtgaggagaccagaggcattctagggctgtgctatcccatacagtagccacaagccacacgtggatatctcattttaaatctgaattaattaaagtaaagagctaaaattcagttgctttgcccctccccccaccttgctatattttaagcactcaatagccgcacgtggctaggggttctatactggatcgcacagatacaggatgtgcctgtcaccgtggaaagcactactggacagcgtgctgccagaatttctccgtaagtttgttctatacaacctcaagcaaggaaaatgtgtttgaagatttccaaagtggcccctctaatgatttatgatcttttatatagatgggcacaaccgcccaaggcctgggcagcatgagcctgaactggcttcttgactgtgggctgaactcctggtgactcgccttaatgaacaggctgccaaacttcctcagcgagaggcgcctgctcaggcccaattctagagggacccactaatgccattcacgtctcattatgaacacacttattctgcacagcacttggctgtcgccacggctcggccctccgtgcatggccccagcaagccgctggtccggggaacagcaggacgttaggcctgagtggccgtctggcgaacaggcactctgacactaagctggcacgtgctggcccagcaggggctgagcgaggcgtgacaaattactcaaagagctgagctaaacttatggctgacaaccacctgagcctttggaccgccgtggcccgctgtcaacgctcaattcatggctccccctttcagtccatcgtctgcttgtgggcctgggttagagcaagcacgtccctctaaagacctgtcatgctctgcctagcatcgtcctgctgtttcctcaaaggccccactgcgtccaacacatccacatacagtgcttgggacaatggtgaacaaaaaggaaatgcgtgcgcattttgctaactactctgcggaagccacgtatctggaaagtggctggctatgttaatcaagctcatgatcaaacctacaaagggacgttttgcataataccagatgaactgaccccagacggcagcccaccgtcccaatcctggatggcactatcataagcttgttcttgtcataagcttgtccttgtcaaggctgagagatctgggcaccttagaggaagtccagcactatatttagaggagtaataatgaagttgtgagattctctgattcaatgaatatttatggtctgactcctaaattaaggcagtaggagacagaaaacataaaggtgcttccagaactggatcctggaggagcaagtgtttccttcatagaaggttcctgaccctgccatgcatgcccccgactgtcacacacagcccacactctcccgcccactaactggagtgttaacagtgctaaactgggtgctgtcatttagacaaacatccattagggattggggtgagaccaggagatcatcaaatacattttcgctcatggcccaagccagggcatgtaaacaccctgacaaagagaaaacaaatatccccttagctctggcagcgtttagaaacagccaaggagcttgtgggtgccaaaaatcatttcttttagtagccataaaaaacacagcgctgggatcttaactgaattaattgcaagggcaatttggagcagtatcatctgacattttcttatctaatatccttagggcttcaatgctggttgctttctataacaaagggcatttataatctagacatcaaaatgcttgtaagcttttcacatgtaagacatgttaaaatgttaagtgaatgctgaaataatgctgatccctggacggtcaaagacctttcactgaaagaggcaccaggtcaccaatccgatccctgtttcaatactagccatggcccttttgttcccttaaaaagtttactaacaaatgtgtaacttttaattctgttctgaattattatctcatgaaaagccacacacaacaaagtacttttttaaagagcagttttcccctggattactcaattcagggaacattcaaattactgaccagaaacccatcttggcttctggacatttctcagtttctttagccactcattctgttcacattttcacatatgaatttttatcaagaattttgattaagagacaggcctgtagtcccagtgactcaggaggctgaggtgggaggatcacttgagcccaagagtttgagtccagcctgggcaacatagcaagattctgtctctagaataaaaaataaaaaaatggataatattcctctactttactaaagaggttatacgcctttactggttacattttatcaaaaatttccaagagaacttctcgagactctcaagacacaccctgctgaatctgcagagctgtaagaatctgagaatctgaacctgtcccccaactttactctcattattgtttgttttaggttttagaaatgacagtagcagcatgacagtcaggaaggagcttgtattttggtggaaggaaggcagggtttgaatctcagctgcccttttccctgctaggtgttgatgtccccattttacatgtgagacagctgaggcaagtggttccgactccagcctcagttgtcctactaaatgtaaaatggggacaacaacgcctgttctcaggacggctgggaagattaaatagaatcctatatatgaagcatctacctgggttccagcacaaaaagaaaagcatgataaatctggattgactcctccctgcctctaccatgtgggcctagggttttgttgcagaaagaatgtagtaggtaagctggaggagagttctgtgtcaggctccatggcaagcaaaccccctttaggctacaccctcatgagcagggaagtcctgtggtctccattttactgatcaggtaatgagagctcagagagttcaagaaattttcttgaatcacagtcacacagtaatggaattaaggctacagcccaggtcctctaacctttactgctttcatctaatatcttgaattctagaataaatggtgttaagttcaagatcatgtgtgaggatgggaactaaactccaaatgagacaaatcaactgacttaaatatacgtgagctataataaccaacccgcaacgtaaacctgagtgcgtatgtgtaagctgcatctatacccagatcatgctgactttataaaatacaacaaaacaacaattattccattttaatttctttttactcattcgggctatgtgtttgttgactgttgtttagcactatcaagcttcttttatcaaagaaataaagagaactgtctgtaagaggctatgttgcagactgtattttttcaacccttgaaacccttcttgcctgaaccttctctaaatttcccaagagtggacatgacgctcagactggcaaagtggccccggacacaggcagcctcctgacatcagtgtgtgtgtgctgtaacagtttgcgtacccacctcagttttctttctgaactcatgcagcctctaatcactggcacaagcaagcccagagctagccattctcatgactctaactcccatggcagtgatctgcagaggagggaatgtcatgtttcagaaccacctgggacgcttcagccatccacgcatccctctcaaaagttctggcgcccccgagttctgctgccactgttccatcccttgagtacattagggtgtgtaaaaggttgaaaacctctggctaaatagctaccacgtatgaccatcttaagcctccttatgttagttttctgtggctgctggaaatgaccaccaactgggtggcttaaaacaacagaaatttattctctcactagttttgggaggccacaggtccaaaatcaagacgacagcagaggctgcaggagagattttgttcatgcttcttccagttccaggtggctgtctgcattcacggggctgcatgactctcctctttgcttccatggctacatggcctcttcctattctatgtgtctctcataaaggacactcctcactggatttactgctctcctggataacccagaatgatctcctcatttcaagatccttaacttatatcagcacacagccttgagtcaaatagttaacattcacaggttccaggaactgggacacagacatatggttttttgggaccatggtttacttcaataaactccttgaggacaccatatgagtcaggttcatcaaatttatgtcaagagaaatttattctcttacgtcactcatacaatctagcttaaaagcaccccacataatatttactgaatgaataaatgaaggcctgaaattcgtgtccattgctttaagctatgagacagctagatatattctaggcaatagcaacttgtaaggagaggttagagagttcaatttgaagtaaaattatacacagatttagaaaactgcgtgataaaaacttttagaggaatgtatgggggcaaactctttatgaccttggggtatggaaaatctcttaagaaaccaaaacatgaaccacagggagaagagactggtacatctgaccacattcaaagtaagagctcctgtttaccacaatactgtaaagaaggtagaactactaggcacaacgtgggaggaagcatctgcgactcagagctggcaaggggtaggtgccagaatataagaagaacgccgagcaaatccataagagaaagtcaaataacctactagaaagatgggcaaccaagagataaaccatgactggcaattaagttgctcagtaccattaatgatcagggattatgagaattacaacaaaataccatcttatatatcccagagtggccaaacacagaatatgtaataatgccaaatgtcagacaggacatgggtcacaggagccccaagaacctgctgctgggaggaactggcctggcttcttgggagagcaatctgaccttatccagggaagaacagacgtgcgtgcttgcaggctggcaattccgctcctcagtatatgagctctggtacatatgtgcttggttcagaatgattataacatgttacaggcaacagcaaaaaaggaaaaggaaactatttttaacattcatggataaatgcagtcacacaatgggatattatatagcagtgaaaataaatgaactataggcatgtgtattaataaggataaaactgaaaaccatgctcaaccaaaaaagccagtcaccgaaggacacattgagtgcaattctattgctatacattatttatttatttatttatagacagggtctcactgtgtcacctagtatggagtgcagtggagccatcatagcttactgccaccttgaagtcctggactcaagcaatcctcccacctcagcctcccaagtagctgggactacagacatgcgtcaccatgcctggctaatttttaaaatattttctagcaatgaggtctcgctatgttgcctaggctggtcttgaactcctggcctcaagtgatccttccacctcagcctcccagagtgctgggattacaggcctaagccaccttacctggcctatatatattttaaaaacaggttaagtgaaacatattgcttagggctacacacatatgtaggaaatgataaagagcaaggaaataataacctgggattacctctggggtgtggaggggttgtacctgggaggttctgaaatatattggctggtgcaagtgggtgtcagtaccgggacgtgttttagtgttccttagaacgtatgtaaatgacatgtcttctagtctatataaatatttcataataaaaatgggcaatttggccagaatgaaacagcactaatcaaatgaatcttttctcacccatcagaaggacagaatgagcttcaagtcgaaggttgatataaaaggtctatgtttgggtgttagagttgacgatgatcacaaagaagtccatttgactcagacacagagaaagcagaaaagagacagtactatttttagggatttcatttcagaaatagaccagaatgtcagagctcaaaattttcagaaagttgtggggaactctgacagaagggattcaaaaagctcaaatcaaacatggatacgaatgccacctgtaggggagggggataatgctccaaaaaataaaaatgtatttctacaaaattactgttgttagaattactatgcattaagaatgacaaaaccagctgaatctgagaatggtcagaatactacatatattcataggcttaagcatagatttctatacattatcctagtctgctcagagaactggatctcaagtggctgtgctattttcaaaaagcaaatccaccttcattcaagcgctcatccattcaagagatatgtattgagtgcccccctgtgctaggtaatgggcatgtaatcaaggaacaagatagatgtcgctcctgccaccagcaatcctgcattctagcagggaggcagaccgaacactagttaaaggacaagtccagggaataaggcaaactgtcattatgtcagtaccaggaaggaaagagggagataagctcaaagaagtctctgatgggagggaagcagctaaccaagcagggatgaagtggggtaaggagtgtaagagcagttcgggcacagagaatgccatgagcgggaaggaagttgggatacttcaggaggagaaaggagactggagtcatggggtagtaagagggtggcaggaggtgcagctgaaagacaagctgggcctgggcacaggaggcccgaatggcttgaggcaaggaagcaacatgatgtcacttaagttgctatattgcccttagaggaactgcaccactaaggagggtcctgagtgtcctctagtttggaagaggtcaaggctgactggcatctatacgttcaatcaatgggcttgtccaaatatttcaataccttacttattctttgcatttttcagaagtggatgacatacaacttttgggcatgtggaagaggtaagaatgctacttgcaggcttgaaatgaccagaacttctgagaatgaccttaagcataaccaggaaggactatggcatggcagagagagggccatgctgggtgacacacacaccctggcgtggagggaagaggaaatggagcagaagcaggctctccggtgaggcagagaatgaggcactacacacaaggaggcaggcacgaccctcccacaggacagatactgggctcacagatacttataaaaatgagatgagttaacagcagctgtggattgaggaatagtaccctgtttcgaatgtgtgaaatacacccacggatgcgttttaaacctagtaaaaaaaagaccctactgtggcagagtctgagctcagagaaggaatggctaagaatattttacaaaactaggaaattaattagctgatttcttctgctgctccccactactggccgcttttggtatagaggatgcacaagaaaataacacgttttcatttttgagcaatgttttgagtagtgatgaaagaaagtgaagaggcaacacacagaataggagaaaacatctgcaaaccatttaagtgataaggatcttgtatctcaaatatataaagaactctcacagatcaacaataaagacaaccaagtttaaaaatgggcaagggatggatgtgcatagacatttatccaaagaagatatgtaaatggccagtaaacacatgaaaagatgctcaacaccacaagtcattagggaaatggaaatgaaaactataataagatacgacctcacgtctactaggatgactataatcaaaaggacaagcgacagtaataaccagtgaggacgatgagaagatgtggagaaattggaatcctcataccttgctggtaggaatataaagtgtggccacaggccaggcgcagtggctcacgcctgtaatcccagcactttggaaggctgaggtgggcggatcacctgaggtcaggagttcgagaccagcctgaccaacgtggagaaaccctgtctctactaaaaatacaaaattagctgggtgtgatggtccatgcctgtaaccccagctactcgggaggctgaggcaggagaattgcttgaacccgggaggcggaggttgcagtgagccaagatcacaccattgcattccagcctgggcaacaagagcgaaactctgtctcaaaaataaacaaacaaacaaacaaacaaacaaagtgcagccactgtggaaaacagtttggcagttcctcaaaaagttaacatattatccagcaattctactcctagaagttcaatacccaagagaactgaaaatatatgttcacataaaaacttgccaacaaatgttcataggagcattattatttacagccaaaaaccagaaacaacccccttgcctgcaaactgatgaatggataaacaaaatgtaatataacatataataaaatattattcagccataaaaaggaatgaagtattgatacctgctgtgacacggatggactttgcaaacactatgctaagtgaaagaagtcagatgccaaagcccatatatcgtgggacttcattaatataaatgtccagaataagcaaattaatacagacagaaaggaaatcagtggctgcttggggccagaggcaggggagaatgtggcatgacagttaatgggcattcagtttctttttggggtgataaaaatgttgtggaattggaagtggcaatggttgcataactcagtgaatatacaaaaaaccattgtattatacattttaaaagggtgaacgctatggtctgtgaattatatctcaataaaataaatgcccccaggctgggtgcaatggctcacccctgtaatccccagcactttggagactaaggtgggaaaatcgcttggggccaggagtttgagactagcctgggcaacatagtgagaccctgtctctaatggcacgtgcctgtggttccagctggtcaggaggctgaggtgagaggatcgcttgagcctgggaagttgaggctgcagtgagttctgatcatggcattgcactccagtctgggcgacagaatgagaccctgtctcaaaaaaaaaatgccccccaaaatgcctagtggtacgcagtgcacactatgtactgtgaggaaggcctgctaataaaaagatcttcactgaacacatgagagaacaaatggcaggatggcctggcacagcaaaagccctccaggcagatagtggctgaatcatttaagcatggaagacacaggaagagcagaagaccatgtgccgcgactgttctagcagctggaggatgaaaaagacatagtcttgtccttcacagcattcacagcttatatggaaagacaagtggacaacgagctctaggaagctggtgggtggagcgattcatgggaatgaggagtgggtcttcgtcagactgcaatgggctggttacagaagggaagaagcaacaccagcctgtggcaacttggaatctccgaaggttttaaaacagatgaacagcaggacctgatctatgcctgagagataatggggcagggagacaatgcaggggaggaagcggcacaatgcagggcagacccagctggacttggggtgctcaccaatggtaagagatggagatggattctggacataaccctgggatcaaggtgtaagtgaccaggagggtgggacaaaaagggacctgaggaggagggcagggttgagtggaggagtctgaagagcccaagggattcctgggggacaacttcagggaagtgctgactgggactcagcagagaggcctggccagagctgaagagctgagtcatgggtttggagatgagcttgaaggagaaaaggggagaatgcaatgttagggaaccacccccacccccaccagagggtgggcagaagtgaaagaacagtcaagggatatggagggagcgggagacagccatttcccagatcctagggagaagcatctggaaggaggagcagcagggttcctgcagagcctcagctcccatgcacttccctggtacctgcctcaaaggcacatgctccacaggtgggctcaggtcgcatttaataactaaacaaatggataaaattccataatgagcaagacaggaacagatgccagttacatcctaaagccatacatcattttcacaagattttatctctctttcaatataatgtaaatttaaattctaggactgtttaaggccacaaataaatgaatcattgaaagtaaatgtcacagcctggtaacaggtaaagaggatgactttactcaacaatgtaaccaaataaaatggatgttttggaaaaggaaattaaacacatggaggtataagatattagattaagtttcaaaccctaatgatacactcctggagagaaacagtccactactgctcaaaaagaagaaaataccatataaccaagtttaagaataattctgaggaaatgataagagcaaatggaaatgagaaaaagattttcttcaggctattaaattacagacttttggagatggtctgttctcatattcctatgtccttccggcatagggagctgaaggtctccctcctagaatccgaggcgctccacacatgcaacggatttggactatgctgttattagaaatgttcaaatcagttcttcccaggggattgatttgtgaaggagcacatccttaattatagcattttccatttccatcttctccaattctcccagtgcacctcaccttctgcaaatcaccaagtgagaaaatgccccgtgacaccgtcgctcaaagtctcacatcagtaaaaatgtaagtgacaagaaaattcgtcattcagcctatttcaagtctagagaaagtgctgtcaaattgagtgagaaaagattcaacaggctacttcaatgatgaaaacgacagaaaaagtgacgaatcaatatgaacaatagaagccctgagttctgccatgctgacgccaataacttgatttctgggaggaagggagtcaatgtcacttgaaccgtgtttctctttcacagattttcactcgtcctaaagacatcatatgttagaagctaaaaaatgtactcccaaccttaatatagaaaggaccactgctgacatttttggggcatttaatatccatgaagtgacaacaaaacggaaaataattagaaatgcagaactgacctaatgttaaatgatgagttaatgggtgcagcacaccaacatggcacatatatacatatgtaactaatctgcacgttgtgcacatgtaccctaaaacttaaagtataattaaaaaaaaaaaagaagaaatgcagaactgcctctaaatgtcttaaatcctgtttgtggcaaagtataaaaagagtagacaattaaagagcaacacacatgaattgtaaactctgtttctatcatcactgactctaagagaaaaaaatattattaaataaaatacgttacaggtactatttagtgcaacataatttgaattgaattatccaatgtttactcttcgaccattctattttgaaggcaaaagcgactttcatttggcctacagaatagttcatatctaggttgattctagaaattaaataggatcatgatatatgatatacgatagataacaagtaaatgaaactgacaagtataagaaaacatctatagcagatactctggttatccattcctttgagacattcttaattgttacctataaacaatctcttaggcccacgtgaaatcagactaggctcaggcacgacacaactgaattttgtggtccaaagtatttgcaccaagttgtgtacagattttcttcgtttttcatttctgaaagcaattttggggaaataattccttttcatggtatttacaaaagtttagctttatttgttttttcttctgtgcgttttaaaataataaatatcactacctctggaagcagaaaatagtatttctatgcttctatgaaataattttaatagcttaaaggcatctcagttttccaggaagatattcatctgataccaagttatcagatgtcaagaagaaactccaagaaaagttaggggtttaccaaatgaaagtgacttacaaaatgaggaaagaagctgatgtgaaggttgccaagcggccttcctggccgattcagactgcttgagtggtacgctgggttgcaaagcacacctgagtgataaatattactgctgacccacacttgaaactcaatacaccccacagacctatcagagcaaaaaaaataatgccacaattattgaaacctcactggaaatttgggggaattctaataacacaaagctccctcatgatcagaagtagcaaaagtatgttggccagttaatattaaaagcaactgatttctggctattaataacagcatgtgatgcaactggctcacttaggaagaagctacactaagtggacacaagggttgagccatcacaacaaacggccctggagcatgtctttatctgcagcactctgaagagctgctccatctgtaggcatggctgggcccctcaacagacactggtcctgtgcaaaccagaatgaccagatgagcgtggagaatatgggtctcattaatgttatggaaagtagttttgagcagccacagggcaaaagcaactcttttactccttttacatctgttctaacatttggttcactgttaggttaaaaaaaataaagatgatcaggaagtatatataagtgacttacatagtgtggtttgaaatttttatgtttgctgtcaagattggtcatgaaaattcccaggggctgctggaatgacttactctggtttcataacaggctcaattgtactgttctacaccttctgctaatctggttctaggctgtgtaaagaaaaaaatatacacatatagctctgttgaaaataatgagtcttgatgaaggtctacgtgtttgagtggggtagtgaagccacctgtttgctaacgagtctctggctgaagggcactgggctgagaaccccacaaggtggtcatacagccctgtgatgcttctgcttaggggtgaggaagggaaacactgtaatgatcttagaggaaggcttaagaagcaacagggctcaagtgtgaagttcaggcatcgtcactgacataatctcagagatcatcagcaacacacagcatacgggatgcccttttacgaatgcacctcaaaggaaaaagtccctgttctgacagcccttcaggtgtggcgtctgcagcaggtgaatcagactacatcctgagcataagtgagcccccggccaggcacctctgctgatgctgcatcaaccaaagattacatttaaataaagatgccaatgaaaatgatcaagtgcttttaatgggttgaagttttataggctctatctcatttaatcctcacaacttccttctgtggtttgtactatcctaatttttttgtagaggaggaaattgaagagcagtgaggaaaagtgttctgttccacctctctcagatgctaccagcagcctgacttgagagcctggctctcagtcacggccctgcctcttatgatcagaattctcccaacaagagaaaagactagtgaggccaaaactagcagaagacccagttccatctactcactgctgttttcatagaaagctgaaggagtaaattgtagcccttcttccactctctccagttgggactctattatccaacaacttcaggtgaaagaaaacttactgtgttttctcctgcaaattaaacttcaatacttgcatttcaagtatttttggctcttacaagccagtgagagaaatccctgtgggttagagcagaggcgggagtgacagtttcactaaatcccatctgtgtgccattctgcttgcggggtgggagcgtctgcagcacagcacatcagccctgcgtcctgcacttattcatgcagatgtctcttcccctgtcactcatcccttcattagaactccctccgaccggctagcccaggggctgctgtcttcctgcccctggtcctggtgccccgtttcaagtggtggtgtacagcactgggtgccttgtgtgtccttcatgtcctccagtgctcctgggcaccgttaccatgcacctgctgcagtggcccctcggcttgcaatttgacgtgaggcactgtcataccagtgaccgcacaggttgccagtaacaggaaagcaattttctattgagctatgactatatctggcccaggatggattgtgcaagggaaaaaagattttttttttttgtaaggggtgttttcttttgtagctggacaacatatatcatcaagtgcagagcagatacttggtccttcctgaatctgacatttgaacaacagattcaacatttctactccatttcagcaggtacctctgagtacctaaatcttttcaacttttaagagtaaggcagaaggaattcaggttaaaaagtctgctgcagtcagaagagagatcagaattagaaattctctcataataacacatgctttaaaaataaaatttcagaaaaaaatgatgggtgtttatcttaactttttatgtctttatattctgggataattctactttactcttcaatgaaaactgtctgcttttatattttatatgcaaaattccttgtaacagatcccatctattctgcctaaactcataaaatatacaaataacagaaacagcccccagtgctgttaaagataaaattcccaacccacacaattctctgggactttccacatttaagcctcatagagtcacttgatatcatcttcgtgactaaaaatataactgcagtattacttaaaattataatcaaatcattctcttgcaaattaagacacttactcttagaaaaaaaaatagccaaattgaattcggtacgtcttttcttgatagatcaaaagcagctccattaaatcagcagttttatattaatggcatgagacatgacccagatgaggaaaatgtcctttggagccattttgtattttatttgaagagccatggagatgatcctcacaattcatatgtgaggcagaattgtatcactggtctcaaggccaggaggctggacatgatcccaaatgtggtggcccatccacatcagagagcccaggttcatcttctctcaatccctcatttcttcccattattgtgcctgccacccatctattcacccacccacccatccatccatccatccatccacccacccacccacccattcacccatctactcaccaacccttccatctgatatttactaagtgcctcctacatatccattattctctcctcagatgtaaggaaagtacttccttgcatctcagccctcctctaaatctttgatcctataatattcaaatgttgtactgagtattatagtatattggaggattctaaaacccatcatagtgagattacactataattagcctgagttctgttggggcaacatctcacttagaataaaagagacaatctctatgaaataaaaacaagctacccaatgttggtgcagttggctgccactcatgaagctctttgtagccaagagcccattgggtcctcctgcaaaactcaaaccacatatgataaagcagagacaggcaacaaaagtgatgctctgagaccacccagctagcaatgagcagggctgaaactcaaacccagggcgatctgttacacatgctggcctcttcctactcccttatgctgtctcagtttaatctttcaaacttatttaagatgcttgcaatgttcagtgctaaattaatccacaaacattgttgtttggtgctaacaggaagaataaggatagataaattagattcttctttctccccccagaaccaagagtagcacaaaactggccatttttatagctaatctggaataaatggtgactttctagctaaatcattatctgtacaattgtcataagaagctacaatttagaggaataaactacattaatttgattctttccttcatgcagcaagatttgaaaaatttacatgacctcatttacacaaaaaattatctttctgcaattatttccagtgatattttgaagacaatcagtacaaaattctaaagttttcttaattattttgaatggacattttcaaagagagaatgaatttggtgccagatgtggcttctgaagtcgtgacatgcttcaacactggagagcagagcgtctcacggtaaaggccttttgcaccataatcaaaacactgagaggaacaggaatgaactgtcattctttcattgctatcttccaagggggtgaaccatttctgataaatccttatttttaattatgtgccacttggtgtcattcaaaaaccctgaagagggtagaagcacctgtgcaatgactctgaacaaaaaagaaggtagaaattcaggcctgatatttcatgtgtcatcacagatagcagggttgaagtcaaagccctgagttcagatgcagactcctctgagtcctggccctgtgacctcaggcaactagtttgccctgcagaacctgcatcccctcatctgtgaaagaggggttcagggctgatctgcaggaccatgctgcagtgaggggaatgatgccacaggtgtgcctgttcaagatcacagcagcagctgctggacctagtggcacccggtcagtggaacctaacagggagcagctggcaaaacagcaacgtggagtagagccctggcattccagagtagggacacaagggcaggcctggatctcagtgccactcaatcactgactaccgtggccaggcatctggctcaaagttgtgggccctgtggaggcctagggcagcaagatctttccctttatgggaaagggccacatcacctccttgtcccatggcctgaatgcttcctccaacaggtgggggaatatttcatgagaagtgtttttctcaattaaaaacagaaacacagggaccagtgataaggagagtagtcattgtacatgatggaaacttgcctctacctatagcaggttctgatcctgatcaagtatactggtgatttactttgtagactgatgtttcaactgttttcactcatctccagtgaatattaaaaatgtcacttgagaaatttcctttgtatttctctactgcctttacctttcggagttccctgtgtctgtatgttgatagcagacacaagatctcactgttttcatgaaacatcacgtatgtacatcactgggatcacctggtctcagtatatactctacgtagaccccaaaggttaaggacagtacatgagcgagagaactttttaaatgcctctatatattttcaatcagaagtaattattttgtgagttcatggaggacataaagacgttaactcatggtccctatcgtctcccagcatactactgatatgacaggaatgactttgggacactcttcccagggcttcttggtggtgtgaacaaatgtgcaaggcatcatgagaaggaaatggctatacccttttggtgtggttgggggctttgtggagcgagtccccctgaagcgtagctctgagactgagtggaatctacacaggccagaacaggagtgatgggggaggcaggaggaaaacatcatggggcatttcccaagaagccatgcccagagaactggggaacacagggctccttaagaagtaggactggagagaggccggagtctagactgacactgctgttagggaagcgaggaggctcctgagggtagacagcaggctgacaatgcatggtggtgagtctggcagccaggtatgaggctggaggggggagaaggaagggtgccacagcacagagatctgtacagaaagccctggacacagccttggaaagtggctctgggcagagggagaggatcccaggcaggtagaggacatttcaaagaccagacaggtttaatggatgatgcaagagaaaaccaaaacttaaacatgcaccaggctttatataattttaaaatgtatgacacaatttgcaaactggcaataaattactctaaaattatccttgagatgggaggatggccatatgcaaaaaaattaagcatggtgactgtaggtaataatgtattatagatttcaaaattgcaaagggagcagattttaagtgttctcaccacaaataaatgtaagtatgtgaagtaatagttgattagcctgatctaatcaacctgcaatgtatacatgtatcacaacatcacactgtaccccataaatatatgcaattattatctgatggttccaaatgtcacttctatagcatgtgtgcacctctctatgcagccataatgtctacaagaggcctgtgtcccgggtttttcctctatgcaaagttgaagtaggggctatcttcaatgagaaacatccactaatattacttgcacagacttaatgggagagataaatgggttatacatcagttaacttgtaactaataataaattatattttggtcattaaagtcatgtaattttttaaagaagcagttggtgcgagaaacagtaaggactgtgaaataggaaccaccgttgttccaaggctggtgatcgtcttcactgtcagaattcatgagaggaagctatgtttattttcccttgatgacccgaccactatggaataaaacacgtaggtacattttctacagagacggatccaagactgtgactgtctcattgtgcctgtagtggagggctgccagggctctcctttgctggttataaggagctgccttgtgtcacaaaccaggtgattaccatgggttaaacaactaagggcagggtggagagtgaccaagcagtggctccctgagctcgtgacggtgctaaccttttcaaaggtgagcgccgtatatattcatttcagcaagtcacttaatgagcttttggattttttcagcacaaattaaaggcacctacctggatttttaaatcacttggtaatgccacctaatccccctgagtggaagaaaattaaaaacaagagccacagcatttccttagaacatcttgatgtaaagttaatgattctttgagagagactaaatagcagactatttcaatattcggaaacactggaaaatacattccaccatgctatacatacatgggaaaacaaaaaactatttatttatttagaatgattttgaaaaaaaaaatgaattctaatctctccaaatagcctcatttctgaatattttttaaaactagcccgcttcctctttttaccagggagaatcatcattatcattaaatactccaactctgcaattgtccaccctcaagctgtccatgtgaaagtgactggttgatctgactgcccagcagcacttggtgcatgggcagagcctccgctccagctgtctggaggtgcacatctggctcactcgtgagcaccaagaatctcctaagtgaattctccccattctaaagagcctgcattttaagaatgactatgcaaatttagtggcaagccattgggtcatttcatgtgatgccaacaaacatctagtaacacttctatccatttgtctctccattcagacataattatcagtcctactatgtgccagtcaattgtgtgcccaaattatcttgaataattctcacaaaatcctatgaagaaagtattgttactctcactttatagctgaagaaattaaggctccgagttcaagattaggtgataggcaaaccaatattagcaatttcatatggttccacctagtaatttaaccagagcccaaaaaggtggttgggcagggaggggcttctcatacaatatcttaaaagaggtgagagaaagaaactaggaggagcactcaaaccctgcaaggggctgaggggatttggagaagctgcagccaggcacaggatatctccagaggctgctagcctgtgagaaaacaggaataagctctttgatgtaaggtatcaatacaaatgcaacctaaaaacgcagtacttttctgtgcaagctgcaccaacagtttgacttatctcatgaggctgaaatgtttctcagatgaggtccaacaagtataagtactccccaaacaaacctactcagctcatttaaaataagcccttacttaaaaaggaccacaaagacctttgaccaaaggaccacagagacaaggtcagctgataaatgagatagtctggatgtttttgtgagatgaagacgatgctcacgaaggaccaggattagcatctctgcttcaccacacaacagacaagtgctaaaatacttcaaaatccagtatacatcagtgaaattccgaaatttatcagaacagaaagtagatcaaataacaaaatactgcatgatatgtattttatatagtaaagtatacttaacagccatgtagatgaaggttttggccatgttctttgtactcagacatggcatgcagttgtaagctctctgtagtagggaggaagagggagaaggggtggtgatgtactgggaagtccatgacttgttcatctgggggcctgaaaaagcccctgaaaaatcaaagctctagtaatttagcaaggtccagcagtgaggaataaagtgtataaaagcaaaatgaagacaaaaataaaacaaattttaatacacatggttagtctctcccaaacaaaagttgctcatagccacacacactggcctctcatgggaactcatgggaaatgccagtagttcctctgtgggggtcccgggaaaagtgcagagctaaaatccacagtcagcaacgaggccttggattttaaaattaataagttcaaagcctgatgagatggaaaaggttgtaaaaagcaccttaaaagcaagcagaaacactctcagtcccctgtgagctgtgcaggggactgtttcagccacaaccagaaatggatgcaggtgagcctctgatatcctaacactaaaaacagacggaggccaccagcatggccaaatgctcagaagtgaagaccaggaggagatgaccacgttctgcatgggatgtgtttgttttaaagcagtctgccattgcctttcatctgtttgggtagaggactatattaaaattcctcttagaggctgggagcagtggctcatgcatgtaatcccagcactttaggaagctgatgcaggagtatattttgaacccaggagtttgaggccagtctggacaacgtgatgagaccccgtctctactaacacattaaaaactagatgggtgtgatggtgcatgtctgtagtcttggttacttgggaggatgaggctggaggatcgcttgagcctgggaggtcaaggctgcagtgaactgtgattgcaccactgcactctagcgtgggcaacacagtgagaccatgtctcaaaaaagttttcttttagagaaaggcattcaaagtgaacttatgaaaaacaaatctacaagttattctcctgtgtcctaccccatgcccagaagctgacgggacatcacagagagatggctccaatgtggactctgttcttcacctacgattcttgaatgccatgtttgccaatgcttgaggtgcaaggtatctaaaagtggtggatactgcagacccttttcctcaaggaggccctgcacagccacctgggtgttgatgccagatcccctggctctaaactcagccctggatgaagaaaatggtcatgggaggcatgggagggacaggcgaatgctgcaacaatatggaactaaagtccatgacgcagaggcagaagcaacacttcagagatggagggtgttcaccaccctgggcagacagcgcgtactctgctagatgctgggagcagctgaggaaaaggatgcataacagcatctacagttaagggcactgtcatttgggggagaaaaatttacataaatgcagctaatacagagcaaaaaaggaaggacagtaaagaatgaactcttgaataaagtgtacggaatcatattatatctgaaggagaagagtagggaacaggggtcacacccttactagaatgttggctgctgcagagctgacaatgctgtgccatagcaaagtgggaggagcatgtgcgtctctccacttgggggcaggataaagatgtggcacagtgtgatttttagcaaagaaggaggcaggctgatgctgccccggagtcccagtgtggtgaaaagaggtggctctgttctcttcacgaagggaacgagggaccccgacactgggatgtgtctgtggacactgccacaggcaggaactgcactagatctatggcctttcagggactgctctggattgagctcacatggacaagaatcaagattagtctgtgagcaggattagtaaaaattcttagaaatttattgttctaagttctgtttaaatgaacaatcccataaatactgtagctgctcaagtcttgaaatggggtgagttatgtatcaagttgaatcatacaaaattgctgatttttaacctgcaaaagcagcatttcatatggtctaaccctaataccagacagtaacagattacttggaaaagcccgctgggccccagacatttccccgtctgtctgcctaaatcacagacctgcctgtggacattgctccctctctctcaggccactttgctcctcaggaaatacagcagcctccagcatacagtgcttccaggacccttcaaataaaaccccacgaagaaaccagagctactgaaatccttagtacttccatgttccaagtaaatcagatcaagttctctacacatgtgctttgcatgagttttctaaaaagatttcagtctatttaaataccatccctaccagataaaacaatttaatagggtagatctttctttgctcaaacacgttacttatctattccttcttccaatgccatccctaatatgaagaaaaaactggtagtggttgataaagtgtatttaagcgtcacggcaatacatgagtaagacggcaaagtgtccctgccatcagccggtcctgggccctggccaggacacaaaggcatagaacaccagcccagggaagccatctcacttcccctggggagacaaacactggatggctcacgaaggcttcaatgtgttgacactgtcgtctctgctgccataaggttggaggccgaagagtaatctaaatagaaaaaagaataaaaccctggcctagtcgggtgagtagcgttctgggagaggcaatgcgtcaagccccaggctcctggaagggagggaggcaggaaactgccattttgactgcccactacgtcctgccagacacactcatgtgccatgcctgatctaatccctgccacgggcgggcggccagggcgccacctcatccgagcctgtgcattggccatcatggcagccgcaccggggagaccaagctccggggctaactaactgacgggaggctccgagctctgaatgctgccggtgggaccttggcaaggtccccatcctccctgggtcctgtggcctcctctgcacaatggcatctgaacacaaaccatctgttcacatgggaatacataatatgtataatttcataaatgttagctcaataaatgttggcattattaattcaaacagaagttcacctcctgtaaatggggaaattaaggagactggcaaccacaaaccactctgaacgtcctgaagaccgcctggtcactgaggcacacatgactctgcaccctctgacatgccacgtctcatctggccacaaatccccatcaatccagaacctgaccacttgtcaccaccacacgccaccatccaggccacgccattgtcatttcgttcctggattatggctgtggcctcctacctcttctggcctctgtacccagcagcaggaggctttcagggatggtgccgtcctccgttcagccttcagatggctcccacctcacaggaaaagcggaagtccttactgtggctggcaaggccctgccccactgggtgcctgcccctgctgtcacctctgtggtgtggagcccttcccacacttcacacacacgatgtgtgtgtgctgtgccctctgcctgggatgctcttccaagacccctgtctggctgcctccctcacctccttcaggtctttgctcaaatgccagcttttctcaggaggcactgtgatccagacccttcattctccttttcttggcttcatttttctcctcagtactcaccatgctctaacttccctggattttcatgatctagcttgcttgctgtcagcctcttccactggaatggaagttccatgcgggcaggaactgtggtatatctagcacccagagaacaggccccatacctacagagtctcagaaaccactctcgcaggctagctggctgaaggaacaacactgcagtggttccagtggatcctgactccgtggttcttatgaatcccgcaaagagtggttcttaatatgggtcaatggaccccatggggatcttctgggtgatgatcaaaattccaggggtccctgaacttggatggtaaaaaagcacatcttcattctcactatcctatcctctagctgaaatgaaacatttctttccgttataaataggaacataccacagtgatactacctgtgactgtgtcaccagtagaaatcagatattttcatgacgcattatattgttaccagtgtctcaaaatattgattctgctcattactgcttcaaaattataatgattattggacctactactagagcttggtatttaatgcatgaataaaggcattcctatattactatatatgcatttgctttagaaagcatttcactataactgatgtactctggaatcctatatgctttatgttctgcatttacaaacattctgagaagtgcaagacatccatggcacaaagaaggttgagagattgcctttgggactgactccctttatcccttttagtgtccctgctaagttccagggtatgttcacggtacagccctcagaggcagtgatcagggtgactcagccaccagggaccacaggcagcatgggcccggggctgccaggcagtgcgctcgggactgcacgcacgccaactgtccaatctgggtttctagctccagatccaaagacagggtcaagctggggttgccaggaagactctcacatttgactgaaaacaaaatggagtttcaagctatcagactaaaagacggactaattatttatatatatgtatttccccccaaacaactaaattcatatatatttacttcatccttacagagtacttatttatgcaaaatggaggctgagaaataaatcctttagaaaaaaaggcgtaaaattgtgttgttcttctgacttcttgtttctcctgagcaaactttgggtcacctttcattgggaaaggcccaatgtgcaaaaggggaagaaaagcacattcattaggccactgtctctagcaggccctgtactaattacttttcgtgtaggatttatttaccatctcttttcccaggcatggaaacggagactaggagacgtgacctggcttggctcaagtcactctcccaatttattactaagtgccctgactgccatctgataatacacagagatgccacagacctaatattcatccttctaagcagtcctggttttagtttttttttttttgagacagggtctcactttttcacccaggctggggtgcagtggtgtgatctcaactcactgcagccgtgacctcctaggctcaagcgatcctcccacctcagcctcccaagtagctgggactacaggcgcacaccaccatgcccagctaacttctgtatttcttgtagagatggggtttcatcatgttgcccaggctggtctcgaactccagagcttaagcgatccactggcctcagcctccccaagtgatgggattataggtgtgagcgaccacacccagcccctggtcactttttacagttaggtatcactagagagactaaatacccaacaggaaacatttttctcatttctattttcccatgatagataccgatcctgggggagtgggctggggagggtgatgggattatccagtgaaaagccgcaggcaacagttcaagtccctctgaatccacagctacatgcacagcttcagagcaatacaaaacaggtaatttaattccataaaattatctttctacagttcgttttttcctcctagcctactgaaatgtacacaccatgagtacaaagtacaaggtgctgttcagctgtaattttacttctgcacatatttaatgtgctaatgggatgaagcatttcatggttcctgtgcttagcaaatgaaataaatcaatgtgttaagagaaagcgattttgttcttgctgtttggggaaagtgctctttactttcctattaacaaaaacttaatgaaccatttcacattcaaaaccccttaggtcataatgtctatttcttaattaagtttttacaagtcaaataatgctaattttcttttatatctccacacgggcagcagcacttaaaaaaaattactgagaataaacaacaccacagagtgaggactatttcagtgagttaaatatagatgcttgtagggctttataaaggaagatagagaaagcaaaatgacctggcccagaatacatgaagtataatcaaagaaacagggtatttgggttactatggaattcgggccaaaataaagttttttgtatggtgacgacttggaattttgcttcaaaacaggaagcataataatgctgacctgctctaagaaacagtggtcactgagtatttaagttctttttcttgaatttattttaaatttttatgcttaaacttcccagcctgtattaaataggcctaggctttgtacaatacagaaacaggtacttgaggctcactgctggttcgttcttgggccagtcttattttctttcatcctaattgcgcagacagcatcggagctttgtcagctttacctgctctgaatagaagcacttttggccccccttgtcaaagactagggaagaaagcccgcgctctggttggcagcagtcttggattctcgcccccggccatactgtgcaatcacgctgtttattccactgtaacaatcagacagcgagagcagagcacctggtactccccggcccgggccttccttggcagctgacgggcaacctcactgccaggtggtcgcgcttcaattacattagctagccattctagggttaacgaggacccactttcttcagaatgccccgggaaaatcagttattcataaaagacagtatgccttttgttgatcattgaacaatgttgctgaaaatccattaaattaaattctctttattgggctgaataatgcaatagcaatagccccagctagaagtttgcatgtttatttaccaaatttctgaataatttatacatggatcctggctcttttatcagttagtggccaaatgcttcttcggaatggagcagtgtagctctgccttcatcttaacatgcaccaacacttgcaaataaaaaacaaacaaaagccgaatttaatggagtggtcagaaagggaaatctcattttaattcagaattcacattccaattttcttttgcaagaggactctcacatattttggcatgaatttacataagatgctttttgggagctgtttcacatgaggacctttttcataacagaaaatgaaagagaaggaaacaagtgggaagtgggacagccgttaatctgtaagttagggaactgctgccaatgtttaggtggaaggtgaccgggatgaggtgagtgtgggtggacctgtggctagccttgttgaaacaaacaaacagctagaatgtcaccttgccctccctgggcctctgcagcagtgaccacaatgacagcagaggcaggtcaaggcaggacagcagcagaagcaagctccctcccttcagtcgtcagtcatcctctgcttctctccctcaagaccagcgggggttgctggaggagcactccctctctcctcctggctaatgctctaggttgcccatggttggagcactggccatcagcctcagatacagagctgtagagttgacatgtgctgggaaagctttaagtggaagaaatgtaagaaaaacaaagttacagaggtatcctagagtcatttaaatactgctgtcctagggatgtagtctgagctgttttggagatcattttaaaacaggatttttctttttttaatttagaggcagcatcaacagaaagtgaaattatcctgaagtatacattatttatcacaaataacataagacaagccaagaaagaaattctattggatttcactttcatttaagaaaaaaaatttactgtttttcagaaatgaaaaagagtatctgaataaatttagagaaaaaggcataaatattagttggtttgcacattcaaagtagtctgtgaaaatatttttagcaattagtgacaatgcagttggaagacagacagcagtggctaagagagtgagcaccaagccggggtgtgaattcacttctcacttgatggctgagagatcttgggcaagtcattcagcttctctctgtgctttcgcttctttcttgcaaaatgggacaacaaccctactttctagtgatggtaaagtacacataaaatatttatcacatcgtacacattgtaagagctcactaaattatgacttatagattggccaagagatacttggtgggaatgttctacactttcagatgccatgaggcatcttcactccgctctctgtcgtcttagcctaattcaagttatggccatacactcagctactctgagtcccttaatgtaaccatctcattcgtttcctttgcagtggaatagcacaaacaaattaaaactcaaagcaagcaccaaagaataactgtgttatattgctaatgaaatatctaaagcatggattgtaatcagacatccaaatataaatgttttagttttgctccctgatcatttctgataaacactttggctttgccttggcatttatcttcctaaagcagactggtattacaatgtacggttccagtaacattatctctgaattataagatccaccttgaacaaggctccagcacaaaggtattagaatgtgctgatgacaagcagacactcttctactgctgaaaaacaatggctgacacttctgtacgaacagacagaaggcacatcaaaggaagccttttacagagaaaaattgtgtgatgcccactttaatctctctagaaatctatgcacgaactgaacccaatttcatttttcacataaatgctaaggcttgatacaaggacatctttttctttacagttaaaagatgaagagacaaaagatacgctagcatagcctttgaactttttaaagctctatcaatggaccatgatacttaaccactgatacaagggcagagattttacaatagctgcatttaaagcattctgactaaaaccagtcattattatagattaaagaaaggcattaatatccacgttttccttaaagctgcatagtttttatacttttaaccctttgatcaattaacaaaggtctaaaaaggtaagattgtaataccagaaggatctgtaaaactaccgtggcgtggggatgtaatttgaaggggactgcattcatttcctggatgaggaaggatgcataaaaagcatctttttgggtgagaatgcgggaagcagtcctccagtgaatgaatggcttcaaactgagatagtccagatagtgactcttctgacattgcatcattttctgggggcatgggagaactatgaaacgatgtctccaggtgcctcttgatcttcacctttttccccttgtatctctggatccctcttgagccttggctgtcccataccaggtgcccctaaatgtgaagctggtgctatttgtcttttatagttgcagccacctcaatcttccagcatccctaacttctttctgcctgtcaggctgctgtgcaaggcgtaccacatgacatcctcataaggtggagtccagctttgtggtcagaatgcctgtgcgccaggcccaccataaccattataaagtgcttgaggaagtcatgtgactcctctgggcctgtttccgcatggctaaatgatgaacacagtggtgcccacatgaagtgcttagtacagtgcacaacaaaagctaagtcctggatagctgttagccactattctcccctctcagatctggaagaaaccatgggggaatctcgagtccatctctcacagcagcagcaatcctttcttcctagtccttgggcatctgtgaatccctgctaaggggctgcttaatgccttagggcagcagctcccattcctggctgcgcatgagaatcacctagtggttaatcggcactgatgcctggcccccattccaaaccaagttacccagaatctgtggggtgggtgctgggcatcagtcaatattggaacccccatgtgattatatgtgcagccagggttgggaaccatggtttatggcaacacaacacacacacacttcctctggaatcctcccctctgtacagggccacagaatgggacagaaggacctccaggggcctgtaagcaagaaatgtgtcagatacgtgttaaaaaggaatgcaaattcacggcttgcatttattttaatacaaaaatgttgtatatgattaactatcaagtactgctgatgatctgcaaaggcacgctgtgtgtctcctgggactctcctacaccctagcacatcacctcgtttcccaatttgaggagatcttacttatttcaagaaattttaaaactttttattgacaaatacacacacgcacagacacacacacacagtacacagaagtataaagctcaatgaattttcacaaattaaacacactcatgttatcagcaccccaataaaaaatcaccagcaccttcctgctgctttccagacactctcccccttactggaaggataactcctctcctgatacactgcagattagcctagcaaatactgtcagtttccccaagtggttgattgagccaatttacattcccaccagcagcatttcagagttctagttgttctatagtctcaccaacacttggtatttttcacattaattttaatacagtagccagtccccccttctccgtgacttccttttccataagtttgttacctgcagtcaagcaaggtctgaaaatattaaatggaagattccagaagtaattcgtgttttaaactgcacactgtctgtccttttgtccagcgggtccacgccgcatgcgctgcctattagtcacttatcagatcaacagccacaggatcacctgtgttctgtgttgcatgtgcctgtgttcgagtaactcttattttactcaataatgtccccaaagtgcaaaagtagtgacgctggcatattgtcataattgttacattttattattagttattattaatctctttgtctaatttagaaggaaacttcataataggtatgtatgtgtaggaaaaacgtagaatataaaggttttggtactatctgaggtttcaggcatccactgggcatcttggaatgtatcccctgtagataaggggaagctactgtaacttgagatgctcgaatgtaatgtctgactattccataagtgcctgagttttgcaaggagattcatgaagatggaagcctattacacccaaagtgctgaattttgcatggcagaaaggcagatgatggagtaaatatattggtcagatgttggttctgagtatgggggccactgaatgacatttactctgttcttggaactggaagctggggagatcccccacggaatctaatctggcctttggctccaactgtggccctgactagtccacatcactcagaaatgggtgcttcttcaaattcttgtttttgaaataaaccataacaaaaaaaggccaatcaacccacccacccaattaggctattttctccatggctggggatgggtaaagggatctatagcatagcctccaaacagtactttcctctcaatgccaaaaaacttctgattaatggtcaaacaggttcttaggaattacacttccatgtaattttcattataaataaatttaattgcccaatgtgtttaatatttttagaactagtatgtaaagaagtataatcttaaaaagaaaaactggcaaaatccagcaactgctttgaaagaagctgtaagatttgaactcaaaagcattttctgaaaagctggactcagagccaaagctaatgcattctgctagcactaaacaatgcacatttgctttggaaaaaacatttttttttttaatgactgaatttacaaacatagtccattttcttcttagagctaaagtatcatctctcttgctggggcactttttttttttctttttctttcaaaatcctctttaacaggagctgtggttagtaaaatcttatattcttacttgagcatatgttcttcatagaaacccaaactgtgacctctttggattgctgaatgaatgtatatgtttctagttagtaagtgtgaactgttaaaactcacataaaacacaaaaatttgagatatccccctctcaacttccccattttgagggtttcacataaaaacaagtgaaaaacatttagagaaatgaaaaaacattctgaatatattataaattggttaaacacatatgctggcagattatcaatcttttgttttgaaaaccaccacatcatcttacagtgaaagaggtaaattttcaaactattctgctgccattacttttaaaggcaaaaaccgcaattacttttgcaccaatctaaataggttttgaaatcaacaaggaggagaggagaatgatgattaagaggagaacagcagccaccagaagcaaaagaaatgacagtaccttggctttgcaggattgctgtggaaagcaaatgcattactacgcataaagagatgaatgacactgcactgctcagcactgccctgggttatacaaagctgacctgcgtggctacaggtataatgcagagggcaaatattccactgggcctggtggttctacataaatgataaagtgagtgacttcctgggttgaactagttcctgcagattcaaaatgtgtctgaggctgtgacagggtgaggacactgcaggcattctctggagtgacaagtcaccgagcctctttggctggctgtgcccaaactcgcacttaggaaatgttctaaggccaaattccactctggaactctcaggctgccatagttctgctaagttttagtttgatggcccatttgtcatgaagtcaaaccccagttaaactgatttctcagctgattggcagggatagcattttaattatcttgcttgtagatttcaacattttaatacaattgcatataaagcaaagataacttttttccatttgtgcttttcatttcattaagataaaagtggtttgagtctctttttcaatgggttgataaaggaagggggctatccattgtccagcaccagaaggaggtcagctgtctgacttggtggcagtattgagaatttgctaacatggcaagcaattcgaaagtttcccaggcaaagatgcatttcatttgttaattgatttttaaagactttatcatgaaaacaggattggagacactgcatacaataaacaaaaataacattcactgggcacaatgcccagagaaaccagctacacaaacacaacactaaaggaaaaagatggtcccgaagagaggccaaaatggttcaagatgcagagagctcaacagcaaggggctccagagaagcttcacaaacacaatcctgagccctggcagatgtcctgtcaaggcagctaaaccctcatcacagcacctgtgcacagattcctctggttagtaaacaaagttgctattcacatattctctatgctttgtaatgcaaaaaattaggttgaattatatcaaattgccttttttttttttttaactaggtcaaacagtcaaatatcaacaacttcatgcacttcaacccaacataaaataaggagtggaactcatctcacaatgtctctcatttttttgtcatcatgaagctctttttctgggcacctgtagagaggatgaggtaggacagtctcttgcctactggactgagccacatcgacagtatctgaggatctctgccccgcatcctcagtgtagccagcaatgtgccaggtccctgatgcatgcaattctacaaatgttagagaagggagagaaacaagggggcatcattctgccttccttgtgctccaattattcttccaactcttaatcccttttgcttttatcctcatggaacatggggtacttaatgtgaaacaactttaacgttcattttttccaatgtattaactttataatggctagatgagaacacaaatatagtccctccccagtttggatgggggtaagtaaaaattgtttttgaaaaatgaatattcagatgtatttttcaccattatagaaataagagttaatattgtgatgaaaagagctgaatacaacatgaatgtagaactctatcatatttcaagacagaaagaattttttctaggacttgagagtacttgaccgagtagagtgtagtttaatctcaatgttaaatagtctttaagaaaaggcagataatccataggttgtccggttgttaaaaatcaggattaagctcctggtcttagttaatagatgtgttaagtaaatgaatgtggctagttttatgctatctgccatataatatcaaatttatcaggtctttgaagaggtgccaacaaaacacctctaaatccagacagaattttagaacacactaataattaaacagataatgaaatttaaaaaatatattacttgagtgttactattttccaagaaacacagttgttactccattatttttaatagaatctatcctacaaagtttcccaggcaattctacgaaaagatattggaaaacagaaatagcatttttgacattcaagcatttctacaactttaatttcagaaggaaaaacctcaaagtaacaaatatatttttagggtactgaaagaaaatatagctttaaaaaaatgttaatctttactctcagtgaagagaatgactatgaaaactgaccagtgatttacttactcaaaaagcgacctgactttgggtttatgaatgtatattgaaaaaaaaaaaaaaaggtaaatctgccttcaagttacgacttaacaggagttcggtgagtccataattagcacctcccatggcgggttttctagaatcttaacacagaaaacctggaatgcacatcttatttaacaacctgaggagacagagagcttttcacaggcaaaaacacattatgaagttcattaattaaacagtgcgggtggagcagatggatgctacctacgcttgaatgacgctaaattgggacagaggtttgcagtccttaatgaagctccataaaatgaatgattacatagtgatcacaagtaaacaaacctgagagaagagctggattatagggcaacaagtcctgcaacatggtaacaagaagaccaacatgcatggaagcacctagtacacagagaggctttgacatcattcaatcccagaccatccccagggttgaggaaagctgtgtgagtctacaaagagttaaacatgaaatgacagtcggtggggcaataatataaaaatgcctggccatggaaatgaagggagcagaaacctttttgtcacataaaatccattattgagaataagacactcaagtttccttttatcttcacagaaaaacagatgcaaaatgtcaggtacttgggctttttaaactaaaaggcttagcaaaagcagctagccagctaatgtgggcattaagattatttttcaatcatactttcccctgtcactaattaattcttcactttttcagctattgttaagcccttaacttttttttttcccccggacctaattagcttgtgatgcacatgaacttgcatgtctgctccaaagatatcttttgaactcatggggtagaatagaaatcattttgatattaaaaatttcctataaatatatgctgttgtctggaacttattaggttagaatgacctattatgtcttccaacttatacaaaatataatttcattaacagtaattgacaactttagaacaagaatggcccgaagacatgtggtagctacaccttacagcaagcattagaggtcagcagtagtcaatggggatgccctgctctgctgccagagccatgactgtggattctctgtatgccttcagatgatactcttattttcatcctcgcttcctgggctttgattttctctttctcattatacatggcctttatgtaagctctttcaaatctattttagagagaggtagaatataaatggattccacatatacaaataaatatcttgctagcaaaaagacagaaaaatcactgtgatggaactgcgtcctcaactatttctcaaggcaaaagcacactaactaacatcaattagatgcttattttgggatggactctaagtgggatatgccagtaagaatatttaaacttaatattttcactgctttttaatttggaagctacatgtatttaggtgtaagagatgtacacatggtatcaaaacgggaatactttccatcctaacttaacgataattttgttttcatatttattccatacaatcaaggtttaaaaggctaggattcacttggtaacaataatgagagaacaagctaaaactaattggaattgcttcactttctgaaagctatatcattttgatggtctcctattcttaggtcaaaagtgtgcacaaatgagaaacagcaggcggccatagagtcaggttggtctgggctctcatcccagccctgccctggctgtgggccccaggccaagacccagcttcctcgagcttcactctccccatctgtgggttaacacagtcccattctgcagggttgtcgccaagagtgagaataatggtccaacagtccttctgggtgcctgtgatcagcctgcgcttttgcacatcgtgcactgatgttccaaactgccttttggagctgagtttactctctggtccattggctgatgagaaagcattttatcagttacatgcagacactaactactgaccaagagttcaggctcagcagtgtctccacttctgtccttaggtaattatttgaatactccagtgaattttgccctcatttcataaaaatgagtggtaataggataaaataaaagtactagtaggagcaacaacaaacatagctctcaaactcaaggcagtgaaagcaaaactagaaatcctcacatatgccaaacgtggagaattttaagtgcctaataaatttttaggcacaccaaatacacaccagcttatttccaatggcaaagagcaaaattagagagcatgcttgaaaaatggcatcaaaactggaatatagaaagtgaggcccacttagaaattttatatatttttgtttcattttcagagaatagaatgccctttataagttagatgtgcatttgaattcctatctgtagatcagaaagcaaaaacttcagacttaaacatgaaaccaaaatgaaacatcaattctgagtgtctagcctgctccccaaaagacatcttttgggcttccaaaaagtaatctatttttaaaaaaatctatattaccctcttaggttgaagttcctttataaattcattcatttgccaaattctgattgcaaaagtgctcatgtgccagactggctacaaaacacttactgatccataattagaaactgcctaatcatttcatggttgcaattcctgactctgaaatgtttaaataaaatgttcagtaaaaggttatttataaaagaaccaatattttgatcactacttcaaagggaggcctgattgtgtaaatgcaaataactgccttattttagtacttaaggtctcagattgaatgtagctatctattagcacaactgatccaaagtttaggagggacattcttttagaagatcccatgtatttattttctagtttgaaaaatggacattttaatataaatttataatctaaatttctgttgccagaatttggttaagtgggccttatttagtatactagaagagactatgcaaaatcatattccacaaaagaatcaacattctcttatagctttaaaatactataatgtgagcttgaaatgctccacacctgaattgataagagcattaggcagtagtttctatgaagcttttaaaagagaaagttaacttctactaaacaattacaagtgttcaactaatacagtgtcttctgaccgattttctaataacagcttttaaaataaatctaccaaactgttttgactcttccaatgtaaaaaagaaattgaaagttaaagcttaaaaattccccatatagagaggaaataaacttaaaatagaaatttaaaataacttcaatccaaagtaaagcaaatcgtttcatacactttcagtaagtataacaaattttatatagtgacccaaaagtcaccattgtagagctttgcaactcaagacgttttagctggaggggttaaaagtgtgggtgtggaagtcagcttttgtttgaaaaattagcaatgctatgagtcatcgtgcattagctgcagaagagttttgcatcttgtacgaatccagacaccatatgccatgcgaaggcctattactttattcggtgccaccgctgacaggcagccacgtgggtatccccagcggaagggctgtctcctcccggcggcgaggacaggaacccagtgagctgaacacatccgacattgtacggagcagcaggaacagctggtaagctagcaagcggcaacggcccagcgaggagcgtggatgctaatgagcctggcgacaatgccggccttcagaggggtaagtgcaatgtcggccggcatgttcccacaacagcctcaagagtagaatctgctcgttcatgccttcagtctcattaaagcatgatactggtatttgtggcttatcaaaatcagctgtaaatcacaagttataaatccgaccaacagatccaacatgatttaaaatgttgcactgaaatgcaagtaaaattccacaggcatctttgggtcctgatggagaggtgttgaccaggcactggggtggtggggagccgtgagttgatggcacaggtggagcagctgctgctggttcaggtcctggttaccattcacaaaactgtgtggcctcaggcaagttatttaacttttctgggcttctgttccctcaactatattttttaaacataaaaaagtttgtgacataatagattgtgttaagacattgcattgcgtttgcataatacattaaaataggatcataattgtgccttcctgataggattgcttaataactgaataaaatatgtgaggttcttagtgcctgggacagagcaaagaatggtgcagctaagtaaacagatgtctctccaggtgacccaagaggacagctccaagcagcttcacctcctggtcttgttcttctcacacaagacaagacagtagcacatctccttatgagtgaggggtctatggcatgagatgggggaaggtgtctggcagacacagtgagatgagacagcgataagaaggggagggagtgatgtgtgcacatctgggtgctgtggaccccaatctgattactgcggggggtgggtttgggctcctagcagcatctgaagctccaagatcaccaagtttcttgatggttccaggtttaccaaaggctcttttccgctgaaagtcgtttactttttctgaatgctcctttcttccatcaagtccctgtgacgcctattcaccctccaattgccaggtcacaggccctctgtgggacgccttgaggctctgggctgcactctgcatcacagccatgaggaaactgtgcactgctctcttccctaatgtgctctgtattcaacaaagagcccctccagggtgggcaccgggccttccatttgtgcacccacagcaacagcacagtgcctggcatacaggaaatggccgatgggtattttgttgaatgaatgagtacactaacgaaaaaaatgcttttggacttttcagaattggtgtctaggaatatgaatgagattatcagattatcagaatcagttgattattttttgtcaagatttttttaagccctaagtaaaagacattttactgaatgatcatctccagcaagaaatgcaccttgcacctctatatcgtagggcaggatgtgtgtaaatatgagagagaactacctggttcttggagaaaaacttgtttctcagaagttttcctgtgagctaagctcaacttaaggggttctccgaaggtgttatctgtactctgtgaaaaatggaaaggatgcagtggcctgtgaggtgcagattagtgaaagtggccttaaaggtgagatgatcagcatagagtttaaaaggccacagagctcgaaacaaagattacatcccaggagagacctttgtgtaaaatacagtgtgtcattcactaatgaatttgagcatgtctgaatttggaaaccagtcctctctgaccggcaggcagctgctgaggctctcgcacacagcaggcatgacactcgtggctctattggccactgctgcctgctccttataggaccagcacacaacagtggccagaaaccctggttcaaacttgtctcccacatatttgctttcttcagatcagcccttaactttacgttgtatcctgaaatccacagataaaatcaagataactagatatgggaatggaatgaggattggaagccaggtaaagaactgaagaggcttttcctgactccccactctgccttccaaggatgccacaggggtagttccaaagctaatccctaggggaagctcctttggcctcagtggtccagggaaagacagatcttcactctccagcctctcacttggtcacagccattcaaagacggtagtgacatccaatgttcattgtcttctaatgatgttttgtgggaaagtacatgctagagtaagaatgctcttcagttactggcatttcaaatatatatatatttttaaagttttaatgttttaaaaatacccagactagaaataattacagcacaaagcccaggtctgtagtgacgcagtgatggtctggagcagcaccagggagggctggtacaaagtctgagaagggaatgaatatctgtctgtaattcacacatgcatacacaaacacaaacacatgtccatttccctgaatcaagtttcagaggaatggtgatccatgacggagattataaaaagtacacattacaaacagaatgtgtccctaggaagggtgttacgaatctaagccccggagctgctgcctccacagtcccgtgtaatgccacctaagtgctctgcctcgcatgacttgctgcaggctgccacggattagagctatcgatcgctgcctgcagaagggtctcgctgtgcgaaaggaaggtgagcgctagagacagacagctcaagtatcgatctgctctggcagaaggccgtggttccagatgcagagtggcactccttcacatcacccatgagttactataacgtgcacggaaacactaaagagctgggggatcgggccaaaggctggaatgtcatcaccacctcctcgcctgtcagctggtcacgagatccaaagatgccatgtgaaatctctggctgtttaaaaaacacaggcaacaaaagcctaggacgggcattcctatggtcttccaaggcagaacggacaaaccactgccacagaggactgccaagggtcatgttaagaagtggtcagagaatgtggatacatctttaagaatgttcctccagcggctgagaggttcaccagagccatcaggccggctcttactataaaaagacacaatccttttccccactaaaagctgatgccttcccctacttaaagcaaaacattaaaaaaattggtccaaacggacattctccttaaagaaatctcaatgatacaatttatatggttttcaaaagattttgggggagacaacttccaaggcacaaagacataaactcatctaaaaagtcaaatacaattatgaggtacatcaaaactcatgatttttgaaagcaatataaaattaggattcatgagaccaagttaaagtgaaaataaggagctcaaggaaatcaagtgtaacaggaacaaaatgcacgctttcaacacttgcttctgtggacacaggagcagagtgaactctattgctttcatgacttaactctctggatttagaagtcattatttaaatcagttatcttttcagtatccatattaagtcatttcctcccatgcacattgtaaagacatcctgtggtgtaattacataaatggcactagagtctactttcccctaattagaaattccttaaaatgtttgcatttctgattttaatccaactaacatctactgacttcttatgatgttagatgccggagactgaaagatgaataacacatagctttacctttaaggagcttgctgaccagtggaggggcagatgcctcatagtgagcccctcacccagtgtggtcagtgctacaccagctatggaagacagagagaaatgtccgttggcctgtggccctccttggacaggcaggctgctgcttatctcacaacaggctcactctcctcccttgaatctaggctggccttgtgacctgctgtggccaaatagttctgagacttccaaagtgctattgtgaagaagctggcacctccacctggatctctggagcctgtagcagccatgtcagaagcctgactgctgcgagaagacccaaactagccaagtggaggggctgctgagccaggtatgcctggccagccccaagctgttccagctatgccaatgcaggtgccagatgtaagagaccctgggtaagaaccatccagctgagcccagtcaacccacagaaccatagaagagcctccctccaccattttgcctttaaacatttctgcaaaaatctttataaagttcctttttttttttaagtgacagtgtctgcaggctattcaccggcacaatcatattgcactacagcctaaactcctggactcaagtgatcctcccacctcctgaggagctggaacttgcaacaccatgtccagctcttgcaaaaatcatgatgcttaattttgcaagtttgcagactctcatgtgagaagacaatgttaggacttctattaatatttatctttttatctccaatgatgaactcaattaagctttactgaaatttaacacgtgcctgacacttgcacccttcttgctaggtcatctatcagactgtcctaggtcaggttcaatgtatgagctgtactaagaaagagaaggagagggagcgaggggctggcagtagagccctcatttactttcagcacagggagaggtaccatggtttacatgagcctccaaactgaagtgttgaactttattatcctataaatcgtattatctttacaattcactgttctgaggcagagcatgaacatggaaatcttttgtcgcacacacgagtttgccatttatctcacaggaaagatcttataaaagctgaaatttgaatataaagatgagttgctcatttttcttttttatggaaagacaaatgtcctaaatttggtgaccttttctgtgatgacaaggagctgaattcgttcattcggcgtgtactcactgaaaaaatatttactctgcagcaggtgctgaggctacatccagggttggtattcacctggaaaacacccgcatggctggcgtcctggtcagtgccaaactggtgtccttatgtacccactgttaaatatttccactctcacccttggaggcaccagtgaacaaagcagacagaaatctctgccctcacgcagggggcacggtgtgagtaaaatcagtgaattacatagtaactgagagggtgataaaggctgtgggaacacacagcatgggcagcccaggcagtgctgggaggtgtgggtgcacatgtgtgcggggctctcgcatagggagacagtgaagaggggccaagggaacatgccacgtgggcatctggggagcagtagaggcagggggcatggagggcacaggcctcccctgaaggcctggatgctgagggaggcagggcccctggtgagggtgagctggcagtgacgtggctgactcacactttagtcgctggccctggctgatgctccgaggagactggggaggaggccacggtcagcaatgcgcccttagccattcctttaggaagaaagatactgctcccacaaaagaaaaggagagcgctgacactgagtgagagagtaactgctatttgaaagaaacatgctgtaaagagaaagccttcaattgagatgttggaaaatgttgccttcagcatgggaatttattgtcgaagatggtttctgttttcagaaagcactcatatctctactatcaaaacactcataaacagaattttatttgtttctaaacttccaaataagagctgagtacattttgaatctgtttgtccaaaaaaaatacattttttatacatataatatatgttatatataatatatatgtattttttatattacatataatacatatgtattttatataatatataatatatatgtattttatatatattatatataatatatatgtattttatatatattatatataatatatatgtattttatatatattatatatataatatatataccaatacaataagaaatatatgagctgtactaagctgtactaagaaagagaaggagagggagcaaggggctggcagtagagccctcattcaatatatatatatatagacctatatatatatacacacacacacctatatatatatatacacacacctatatatatatacatacacacctatatatatatagacctatatatatatagacctatatatatatagacctatatatatatagacctatatatatatatagacctatatatatatagacctatatatatatatatatatacacacacacaaataaataaaatatatatataccaatacaacaactgatctcacatcaaggaagatggaaatttccttccaaatgtcaacaggaaccttcatagaactggtggctaagaatgtaaactgagcacgaacctgtgatttaggaggtcaagacaacaatctgctccagctggtctatgtcctctttgcaaagttttgtttccggctatgaaaccaagttatcaaaatacactgagcttagatggaccccttggaatcactgaatcacagaactattaaactaagattataaaaataaagcagcacattttaattccactgcactcactaaagcactactgatatcctaataaaagcaaaacaattttacactattgaatataaaatacttcagattactatttcctctttattgcatcctttaaaaattctcagtattgactatactttatgtcataatgtactagtaaagcagaacttgtacatactttaaaataaatcagtatatgcactactgaatggcatgcttaagaggtttttttgctttttttttttttttaggtctttgggtggggtatgtaataagaaaaagcctgcaggcttctgaggtaggtagtgggttggaggcaggtgtcctcacccactaaagtgaggactgcgacagtccggcctctgtgccctcctctggaatggaatggggagtggcgaccatacagcctcaagagcatgctgttcaccaagacccttgcgccctgaaaaaatgccttagcaccctggaatgggccatggacaccaatataataaattataatcagcgtatgaatatctttttgtaaaacaaacaaattaacaaagttatgacatttcccacctatcaagttatagatgacacacacgtgaagagataactaatgagaggtacacaaaaacgtgaattatttgaagcagcagctagaaataatcttttcccttcgagctcccatgacccactgattctctctcttgtatcttgtgttgcagtgactcaacaaatactcactgggcactgaccacatgcctctcccagagcataggctgcatcctaccctatgtcacagttataacccatcctggctgtgaagccccctgaggccactcacctctgcctgccctctacagtgcttgccacggctataccgatgttggttgcaggaagaacacagaagcatggccaccctgatttaccatggcacatgtggcagggtctgggccctgagatgttcttctagttggggctgggagaacgagcgaggggccaggccctcctctacactgctgcatccatcagctcaaccgttcattcattcttcagtctcatatttatatatacttcattccatacatccttacaataatctgtcttggagggattattttcctcattttagagtaaggaaactgacagaggtaaagtattcaaagccaaaaactaagttattatttaatttaaactaacatcaaaacccaaggtctgaggtcagctatgacatgttacctgctaagctgggcatgacaataaacaagatacactttaaaatttatctggcacttgtagtaaaattgctgccatgaaggaaagagaatatccccaaactcttctgtgcaagaactcttctcactgagaaccaagacttgaccataagggtccagtgttatggtgtcagttacacggcccaacatgagacgtagaaaaaggttttacattgctttatgtttcccctaaattaaaaaacaaacaaaacatgtttactatcctactgagttattgtcaggggcattttagttaaacaattggtctacataacaaacccactgaggaaactggcggttcagctcgtgcacacatatgggcataccagctctgacagcacacagcagctctggaactccaaagcatgactgacctgctaccttattgaatcttgatgacctaaaaaagtgatcactgggcaaattaatccagagagaaggagtgtggaatcagagtctggaaatttatgtcagagaaagccaatataagttaaaaggaaagcgcatctcatcccaatctgagctgaaacccacacttaggctaaaattctacaaaaaatggggtggtttatgtgaagtgctttccttagtcaaattttctgcaaaaattatatgcatttgacaaaattatagagcataagtacaaaaccaatctgtttctttttattcaaataatttagatgttgttttctgatgtagtcttctgatgtgcatatgtcattataagcaaagaatgtttatcctgttaaagaggcatacattctatttttctaaatcaatgagtaaacggtatttctgagacattctaaagaggctcttctttttataggggttaaaaattatatgaaaatactccttaaatttaaaactaacttacatttttactgatattcttattaaaattggtttctttggagtataaattcaatttaactgagttcaatttttttaatttcaaaagtgggaagaaaacacacatcacagctaagccgaactctcagcaggcaaatgtaatgtgatgacagttgccatcttctgggagaaagctatggctcttggatgttaaaggcagagcatgatagtaagcagcagcagctctctccatcagctctacgccttctttaaattccactgaggatggcagtttggatggagaccccaaaatctattctgtccatctgttttattattcttagaacaactgtcaaaagttgcccagggatcaagttgcaaacatactaatttgcctttgaaaagtaggccctgggggaattctggaactctgcttataaattcagaatcccatcagccagcaagcctgccctaccctttgtggaggtatgagactttgcacttccaggcatacatctgcctcaaagccgggatgcactgatatactcacatcccacttcataggcaaatgaagggagaaccaaagggacttggcatcttaagggctggcttgttccatgacaagcagaccctgaggtttcaggaggcagccccttcattggtgttggattaaggaccaaagctttgtgctggagagtttaaacaagtggacaaggcagagggacaacatattctgtgctcttttatatcctaggaccaaagaggaagattgaagaccgaaataaagcattagaaaaaataagctaaggaaagataaaaatcataagccactaaacattgtagcatttcatttttgtgattctgatgaaaagagttacaaaaagaccatctgaacatacagaatatcaggtgtaggttttctaaggaataatgagaaatcacccaagagttggctatttaaaatattgtggcattttggggacatgctatcctactagaaacgaaagcagctgtgcacttctcaagttgaatgtgttaaagccatgtgcaaaacacaatgtaaacattaaagtgcatctggactccctagggctggcacacgggacacctgatcatcacggaggagaaaagggagtgggcaccagcacagaaccctgcagtatccttccttcctccaccctggccccaatggtctctatctaaggctttcaaagcacagggcctcagaaatgtatctgaagcacaaaattcaaagtaccccttttagagtgtggtaaaattcctcagtagtaaaacagaaaggacaccctttcaaggctaacatgatggcatttgggtcgtactcacccctagattaccaaaaaagtattctgctttcattaaaaaatttacttgagtgtgttgcaaattactccagcacggaaacctgctgggagctcactgtatacgccagggcagactctgcacagaagggaccaccatttggacttgcctgctttgtccttctttggctttgcagcgtctcttattctaataaggtatgtattatcctttttagagatttgaataacagaaagtctcactttcaaaatattgcttataatcccagagtccactaaacgttctgtggatgctgtttatggcattctgttcctttcaacatgggactgataattagtaaactgaaatttgattaatgttggattaagaggttctgatgtctcactgcaatgtgttatttcagtctgtgggcaccagaagagattgtctttaggaaacttgttcccttccctttccagaataggaggatgggcttaaaaccctgactttttttttttttgttaaagaattcagtttgtagtcaacagtttataatgtaggattcagttttttttttttctgtctcactgttttttgtttgttttctcactttgaagctggggccaatgaattaactatttaagagagaacaaaataaacctgaaataaaagtcttcttccaaaaatgccaagggtgggccttcctggttgagtaagtgatttggcatggataaacggttcagacagctttagatctcaccaggctttgtacccgcttttgataatattaagaactcctctgaaaacaaaggagccgtgtgatataagtatcaaagcctatgaaaatgactagataatatttaaagggaaaattaataaatttagactactttgtgcttttttaaattatgatttttattaggattcattaggattataaaaagtcttgtaatggccagacttttttctatgcttcatggccagaagattccatgtctcttccttgcctgtgttttaaaatttataatcttgtttgcctactgctgaaaagtgtggaagaatcaggaataatggctccctttgaagctctgtcattcccaaagtaaccatctgaatgctaaagaaatattgtcatttatggaatgaccttttgctctttgaatactcagacattaataaatgttaaatgcttagcaatcctagcagcactatgaaaaaggtaagttgggtcagcaaataccctcttgcatgcttttgatatgatgaccatttccacttttctaacagctttctaatagcaaaaatgtatttgggaacaacagtggaatttgtgtcatcatgaccaaatgattacggtgcaaacccgagattcttctggggcccagcaggcttctggtccctatggaaacgaaacctcagatattgtcctccactcagctggaggacgaagcgccaggaggcttttgtgcttggtgagatttcttccacaaccttcccgcaacagaccctagtgcttcctccagactcttttctaattgagatgcaaattaatctctctggctgattacacttcccttaaagctactgacaaatgcagctgtaaccagagtttgcggactttccaacaagtgacttcagctgtcagtatttgcatgctcagccaaggcccgcccgctcccagtctcagagccatggagagcttcctttaggcattacaagcctgttttatttatgtgtatacaatttacatacaattaagagttaaaaacaaaaaaccacaactaggtccctaggatttataaatggactctgacaatgaaattaggccttttcagacacttctttctgacccaggtctagagagtcactcctttctcaggaggccaaggctttgatggtacatttccctcccacttccttcttgtctgcaaggtttctgactttaacaatgtttgaattcaatctctctttcaaaaaccaactaaataaactaatggctctaagaaaatgggatcacttcctttatagtgatctcaataagattctgttaatttaaaatcaaatatgaagttaccattctaattgccaagatttccatataaatgtgcttcaacaacttaggggtgataatgttagaatgattatttagagcacaataaaaatatgcacaaaacacccagtaagaagaaaaaaacacaaaaaccaatttttcggtaaaaattatttgcttcctcttgaatcctatctatttttgagttcctactatgtgtcaggtgctattttaagtgttcaggatccagctgtaaactaaacattcaaaaatggaaaagagagagttaatgtatatttatatacatacatatgcatacatattctattcctaaggctatatttcaccttaggcaattaaggccttcaattttgaaaaagtatcattttataaaatatgatttacttttggcttctgttttccaaaatgtttcttaccaaattactctccagcttcttccctccccccgcaggccttcacacacacacacacacacacacacacacacacacacacacacacacactctctcatactaggggacagcagcagaatggacacaaggcccccactgggaaagccagcactgtggcaagagtgccacatctgagacagaggatagaggaggttcaggctggcaaggagtgagtcagagcagagacgactatgggagggtgaggggtccttggcacaggagggcctcaagggcagtgtgaagggtggggtatagcagagtggctgagaggagactcccaggttaggggtcatcccagtgggaagcagcacgctccctatgatggttggtagtgagatgcagtgacccactggggatggagctgagagaggggggaaagagagaaagaaggaagaatgaggctgttcctgatattcccctagggggagcatcagcctggtttctccacaggctgtgaggttgagaataacttctgaagggatggtcttttttctaacagtgagatgtcactctatagcaaaaatagcagagtgtaccaccttctctcgagatttctcctgcaccttcgcacttctcacgggcctcatttccatgcaccaagagtggagggcagctcctaccccagggaaccagcctttcacacagaagaggaccttctgcaaggcactgaatgaacagcattctaccagcctttattttaatacccacaatggtaaaaaagtaaatatttcctgaggcctaactccacagttaggtggttccatttttacaacagaggtttgaaactccagtatctgcaagggccaggctgataatatacaacaattgcaggtaacgtttgctgggctttcaccaaggaacaggcactgttttacctgcttggcccattagccctctcaccaactcagagagaccaaatggtgggtgccatggtggtggtgcctggcaccaggcctcagcactggggagacaccaggagggactgtggtgaccgtgacagcacatattctgtggagagactgctgtcagtagaaggaaggccccatagggtcagatattctgattcttcaggagaagtcaaaagtctagattttttaaaaatgcaaactctcccaatttttcagcatggctgacaaactcaatttttagtttagttttttggtaatgtgaggaggacaactgcagttaaaacaaagcccatctgtgggctggatttggtgtgctggcagctggtctgcccactctggtttttgaatgtttgacttgacactgagataaagctgcttcctggttgcttctattcactggtcacagttctgcagactgccatcctcttttaatacctctcagactcctgaaacaattacttcttggttttaatggctctccatttggttacaatttctctggattggctctgggttggtcgaggtcccttttaaaatgtggccccagggctgcacaccacctttggatgctccctgaggctgcaggagcacaggccgtagttcctgtgactggacctcatgtttcctatgcagaggtctcaagagaatgctggtgtggctggctgttgcatcactctcatctctcatctccaatctgtggccaaccgaaatcctcagacattgttcacaatgactgctatgaaaccacatcactctcaccctgtactcaggcagctgattatccaaagcccagtacataacgttacattttgccctcttaaacctcatcttgctggcttgggcctggaagtctctcatctgttgagataatcctaatgtgtgactttgcatcgtgtcaaattagttaaccctctcagctttctgacaaatggtggcttgataaacatgttttagacctttatgaaagttactgaaaaaactgctgactggaagacgggttaacagcaaagctgtggcatcgaaaccatacaagacacacaaagcttcttgctgactggtgcccatgaattaatgtattttagatttggtcacagtgaaatcacccaactctcaggggcccatatttctctcttatacctgccagatgatagtattttattttatattttaccaaaatcaagatgtatatgcttcctctaatctccgaaaatagtaatcttataaaacacacagtaagtgtgttccggatactttgtcaacatattcatttctgaaggctcacaggctatttagtaacctagtctaataattttacaaaggatccatgcaacattccaaaattcatcctttaatcctttttgaaaacaaaatattttcctgtttccaattttgggtacatcctttattctacatgatttctaaaaaaatatttcttgtggttctgagattatttgttctacagccagatacacgtggccctgcagtctggagcttaggtgcaagagccattgattgattgattgattgattgattgattgtattcttagcgacttgagttttaatttatccacttaggcacttctctgtcccttcccatttgaaggagatgtgatagagaagacggaagtcattcagatactggctaacagtgcccacctgctaatttacagagtcaagagctcctctttgaatcttgatgtgagtattttaactatgaacgcatcagagaacgcaaccttgtgcagctatattggttgctcctccaggcctcccctttttctttctcagaggaataattttaagtttttaataaaaatccccttattaaaaatctctaattcctcattcccttttacagtctcagcccacccaggggaatatgctatttcttcctctgaactcttctttttgtaaggtgcttcccaagtgtctagggtacaggtctaccaacatttttttcccattcttcttcttcttttttccctcccattcttatacaaactctactgaaagctcattactttttgcaacgtccaacgtcaaaaatccattccttcaaattactaagaaatggatccaaaacaaaaatagtagtgcctcttgtttgcatctctcagaagagagatgagattgtctgccagccaggaatttatcaaacacatgtcacctttggttgaatgtatgtcagagctgatatcaagtagtagaaatccccactacagctatattttgctttgggcctgtttagaaatttggattagaaaagcatggccatccctcccatctgggggtataactccattctggctgccgctcttcaatgcagcccctctccccatgcatttttcattcacaggcacgtgttgacctcactcaggagtgtttctttgtggtgctgctactatctgatatgttttaacatcttaccttgcagtaattcagttctaggtcctcttatacccaatcctccaggtgaagacttgagtctgctagaaccagtcatgaataaaaccacccagtaggatgtctctttcttggccagtctgctgaaactaacccttcatttctctctttcctgcttttctgtgaaaccattctctcctattcccgtctttctttatctctgccccctcctttcaagccatttcttcaaatggcccagagagttctgtctgcgattctgttctcataccaccaagagaccaccgttctattcttctcattctctccacacccccacaaatctagcaggtcccacactgacttagtccacctcctttacctagatatccaatccatcatccctgccactgccttcgacgagacccctgctctctctcagaaccccgtccatggccccttaaatgtttccatcacctccatcctgtgtgtgtgtgtgtgtgtgtttgtgtgtgtgtgtgtgtgtgtgtgtgtattctatactctgccatatggaagcatctgtcattctcaaatgtgataatatgatgtgctctttcaaagcctggtccatgaacaaacattggcccctcatttggagtatcttcacatttctattcctagcggcaacgactgtgcctggcacatggcaggggcactgtaaatgttgacgaatgctaactggtgctgcccggcaaaatagaacacatggtaccatttgacttattttctgaaatgtatggagatgaatggaaaaaataaagatctgtccaggaaaaagaaccaaagatcccactgaacaagaaagaaacaaggttgttatagctttagggagaggagtcatttttgaagatgtgaaaattcgtagcagaatttagcaatgagattccaaagtcatgggtctaagaggggacactctggtactatcaaacacatatgttaactgaaaatgaaagtacatttcacttgtgaaagaatgagatacaaaattattttttcttaggcagcccagttctctccatcaaatgctgatagttacagcgagtagagatggtgaatgccattgagactattgttctattgaagtggacgtttattttaaaaagccaccatctgtttgattcagggtgaactcctcctaacgggcacactgcatattgtgtggcaaccttttccctgaaacaagttatttgatgagaagaatgaaaaccttggctcaaatggttgtggaaacgtctatcagttgaccacggtttgattttggaatctttagtcggcttgggaatggtaaacataacatgtggcaagcttcccatttacaaccctctaggcacaggaataggctctttgattgcccatgagggatagaaaaagcagatggcaggtgagttggccctcatcactcagaaaagcagtggccacaagatgaaggctccacttgacaaatttgatttagcctgcagaggacatcacaggagaacccaggagggacaaaggggctgcgatgaaccgttcctgagggtgctttccaaagatacccctactgtgcttacatttttttttaatcatataagacaatggtatttttcagtcttctatgtgcctttgctgcagagttccaactgttaactcagccaagggctcccaaataagaactgctttgatattgattctaactgcatttacttctcaaaaagacccccaaagggaaaatttgctccagcaatgcccccatccttagcttaattagaaatgtttcattttcttaaacatagcgaacaaaattaatatgtaactgcccacatttccacttctagttaaatattataaaaactaaagcccaactgacacgattttaaggcagtaagtatcagtcattagctggggagaggacagagagataagaaaaactactccaaagtaattccactggctcgtttctttagttgtcatcttagcacagcatccagagtaaactcccacagctgcctgatgtcaggtgcaataagtggggagggagtgtagggcccatcatgcccagcatgtgtaatctccccaagggctgaggagatcagcagtaccttgggcacacctagaaccggggctggctatataacctgagggtcccagtgcaaaatgaaaatatagggctcctttttcaaaaaataggaaaaaatgcctttaaaggtcctaaaatataaaggttttcctatttgtctgcaatctctcaacttgtcatggtattttttatttgctatttaatgttattctaacattactgttttccattttatttgttttctcttattatattccttatttctgtcctgaatattagcccttctgcagacagaaattaaaagaatagagtagttaaatgattgcaaagttttccccactaactccatctctataaaaaattaggtataacagttgatttcttgttttaaacaatttatttgaataataccaattaaattttctccaggtacaagacaaaaaaaagtttaaaatattgataatgatcaacataatagtttttaaaatatttttcctaatttctgtactacattgttgtttgagatgtcaagttagctattttgtgagttagagtacatttactaacacacaatagcatcagtagccctagctggtatccacattagtcctgatgtgtcactgcttgaaaagttttcaaagtgattctgaatagtatcctttgaacttttaaaaataccattttccctaaacctgatcattccaattgtatcacattaattcttatttgagaaagcagtgttaaacaaaataacaaagcaagtattttataatgagaagttcagtaagtagagaaggtgacatgacaaaagtcacaatggaattaatataaaatggaattttctcatttgtaaaataagattttttttttttttttttttttgctgccttggtccaacatacttgactgatgcgtgcccagctcgtcctagttgacatgcaaactgacaaactaatcgctgaatagttctttctcatttctgccaagaggctctttttaatagtatgtgaaataaaaactccatgctgaaggccaaattgacaccagccacaagattacgtctacagtgttgtggaaatcactgcaaagaatgccatctccaaaacactcaccaccagcctggacaaagcacgagagagtacactgaagggaataatcctgccctggcccccaggggagggaccagatgggacctaatagctcttttctactactcatttctatgataattttaagttgccacatggcatatgtatttttttttaatctaaaggcagaatatcagtcaatgaagtgaccaggattttaatgaaaggtattttttcatgaaccgtatctattcacatgggatagttttcatctacccccaactctcacttgctatagcaacacatcacttactatcaggttgggagaagtatatatagaggtcaaacacaatatgtttcaaattattatcaataccaattagaaacaaagagattctaagttttattaggaggtcactttttttgcatcaattttataaggtcacccatcttaatctctttttcttataacttgagatcatgcttgaatttaaggactacagcaggccaattaatgtttgaggaaaaaattttaggagtgaaatttattctgtttttggaaacaaaatcaggaactagagaaaatatcaatgatttgggaaaattacaaaagaatttctagctattcctattgataagtccaaatgcaacttaattcaggacatctttccctctaccctcaaccaaatgcaatttctatctcctctgatcttccagaaacctacttgcacttctcaggtggtacctgccacattctttgatttattagggtcatttcatttgctttggtttctggtaggcactctgaatgagcgatacgttttgctcagcatcccaccttatatacaatggactgccacaaataagagggatacaggatgagactgaacgtggggcaaaatacctaagaagatatgagcatctcataatggtcacagcttctcagacacaaacgtatgtgagtaaattatgaaagtaaactctaagtttaatgcagcataaaattattatatttaatataaattaacaaatgctatgaaaaaccactatgttatttttaacagaggttgaaaaaaattctcttccctcttcaattcagttttgaatacttacctcttatgaaaaactgccaggaatcttgattctgggatggttagtaagttacacatttaaagcaaaaagatacaagctctggtagagtgggatgaggcacttcacagccctgctggcgttgatgcacgtggcacatacaaggcttggcagcagcttcccactcactatggctccatcaaacagaggcccaaaaaatggaacctgttgatttgaaatggaaaaacaaattttaaaaactgataaaagtcaaatcaaagatatgagagtagctgactgatgtcagacctgcaatgagcacttaagctgtcacccacagagcagacgctgaccttaacaggacacaggtctagggctttcaaattgagtgaagcaggactgccccacaatgctcctttactagggattcttcagcaaaactttcaatgacaaaattttaccaggttcttcgttttttctcttctgttgtcatttacagaaatggtgttgctcttaagtgcctacatcatgtgaattatgcatgatacacagacatgcttcactgcacactatccttgcatctgtctgaaaccagttatggaactggtaatgttcctgccatgggtcctgatgtatattaactcttaaaggagatgatgatgatccctgtcaacaactacaaagtcctacacagtcctcattcttctcgaccttttccccctctgcttccaagatactgcattaccttcatttccttctacttttttttgagacagggtctccttctctcacccaaactggagtgtagtggcacaatcatagcccattgcagcctggaacttctgggctcaagcatcctcccacctcagtctcctgagtagctgggattacagttgcaccaccacacccagcttctgtttttaatagagactggcttttcttagctgaacccatttctgttatgtggaaaactcacaagtttctgtgcttgccttttttggatttatttcttctctctcctttttcccccattagaatttctttaattttattcagtaacatgcagattgtaagttccatgagatcacaattcttacatgagctccatgagatcatgtaactcttatattcattcacttattactcccctattcatgtattcagaaaatatttattatgtgttggacactgttctactcactgcagaaacaacagtgaatagtacaaaaatccctgaatttattgagcttggaatttattggagattttagagaataaacagtataaacatataaaatatatgacaggcaggaaaagtgctaaggtaaaaataaagcagggaagagcaatataactttatttttgggaggggtctccagttggctctaatggccagggtgggctttaagaagaggatgacatttcagtaaaggcctaaagaaagtgatgaatgaaccacaagctatgagaacatctaacggaagaacattccaggcagagtaacagcacaggccttgtggtgggagtagaattagtatgtttaagcaaccatggctggggccaagcgagaaaaaggaagaattaagagctaaagtcaagcaggtcacaaggggtgctttataggaagttttaagggttctggatttctgttctgagtaagatcaaatcctcctgaggatttagggaagcaggggatatgatctaaaatacattttaaaggtattgttttggcacctgtgttgacaaaactgcaaaggggaattatggagactagctggtgactactgaataaagcaagagatggtggtaatggcttggatcagaatggcagcagaagtggagaaaggtgacagatatattttgaaggtagagttgtcaggatttgttgaggatggttaatgaggtgggagagacagagaggtgtcaaggatgatgccacagtttctggcctggccattggaaggctggagctacgttttcctgaaatggagaagactgagagggagggtcaatagctcaacttcagacatgctaagttagagatgcctactgggtatccagtgatgatgtattgggcaggagtagctataccatgctagagtcaggggaaaggcctaggttgaagctgttcacttagagatgatgtttctagccatgagatcacataacatcaacaaaagatcaagaaaagagactcaatgactatatcctctggccttccaatgtttagagcttagagacatgagaaacaattagaaaagaaagagtggctggagatggagcaagaaaaccccttctgagtagcactgtacctgacacacaattggaaggcaaatacctgctaaatgagttacattcattaatattttaaataatttaaattaatgaatgtgggtctccatcctaggtctttaaacttttctcaaaaactatttatttgtaaagccccttttctgtggttggcattggtgaaggtgcttgggatacaataatgaaggagagactgtctctgcccataaagagctgacatggtaagaaaactatggactaatatctctcagcaatgatgcaaaaatcctttataatttttttgtaaattaaacccagcaagataaaaaaggacaatatatcttatcaagcagaattttccattggaactcaaggttcatttaacattcataaatccatcagtgcaatttatttttgcaatgtgcaaaaatccacattgacaaaatacagaataaaaaccatatgactttaacagacacagaacaagcattaaataaaatttaactctcactcataattagaaaaacaaaacagaacaaaaactctcagcaaaccaggaatagaagggaaatgcctcaatttaatgagagcttaaagggggaaaaaggtgtcataattaatgatgaaagattaagtattttctaaaagagatctgaaaaggcaaggatgtctatgttcacctcttctactcaacatttttgaagatcctagtcactacaataaagaaaattaagagaaagaaagaagaagggtaggggagaagaggggaacataaaggttagaaagaagtaaaactgtttttattcacagatatcatgattatgtatatgaaaagtccaaagaatttaactagaattagtgagtgaattttgataagcctcagaaaacaatatactcctcaaatcagttatatttctgaatgttagcaaccaacaattgggaaaagacatgtaaaaatgttgtttataactgcatcaaaacagaatgaatttgataaaagaatgtgcaagacatctatattgaaaactaccaaacagtgatgagataaattaaagacaagctaaataaatggaaagatgtacaatgttcatggactggaagtttcaatattgttaagatgtcaattctgctaacattaagctatagattcaacaaaacccaatcaaaattctggcaagcctttaaaaaatatacatgtaccgaatacttctaagttcataaggaaatgaaaagacataaattagtcaagatgataataagaagacttatattacctaatttcatggcacactataaaaatataataattaagaaatcattatagtggtaccaggataaacaaatatttcaataaaacacaatacagagtccaagaatagagccatacctacatggtaattgatttgcaataaaggcagcatatcagtttggtggaagaaaaaagcctgtttcaataaagacactggaacaactggagagccatatggaaaagtgaaccttgaccttcatctcatatcacacacaaaaattgagagggttatagactgaaatattaaagctaaaaccataaagcctccagaaaaaaaatatgacaaaattgccacgaccttaggataggcaaggattttttagggtacaaaaggcataaatcataaaataaataaataaataaataaataaataaataaataaataaataaaagaaaatacattggactatatagaaatttctaaaactctgcccatcacaaaaatgaaaaggcaagttatatatagtcaccaaacagaacatagccacaaggtccatccagaggagaacaaattaaaagtttgtgttatattcacccaacagaatattccacagtaacgaaaatgaacaaaccacaactacatgtaacatcatgaaaataatccaaatataatgacaagtgaaagaaacagacactaaaaagttcatactacataatttcattcctaaaagttcaaaaccaagtaaaatgaatcaataggcccaaaagtcagaatagtggccacttcttcattgtattagtgattgagatggggcacgagcaagaattaggaggctggcaacatcctctattttgatctggggtggtattacacaagtgtgttcactttgaaaacatccatcatgttgtatacttacaatttgtgtccttttcaatattaaatatatttccaaggaaacgttttccagaaaacagcaagaatacagaggatttgaacaagacaactaacaaactcatcataatggaaacataaaatactctacccaacaactgcagaaaacacattcatttcaagcatgtacagaatactttttaaaaagtgaccatatcctcagccaaggatccacaaatacagcctgcagggcctaattccaacctggcacctacttgtgtatggcctgcaagctaagaatgctttttactttgtaaacagttggaaaaaaattaaaagagtattttactatgtgaaaattatgagatctaaatttcagttcataaataaattttaatggaacacagccacacttatccacttacacattttctttttttggagacagagtctcactctgttgcttaggctagagtgcagtggctcaatcttggctcacagcaacctccgcctccccggttcaagcaattctagtgcctcagcctcccaagtagctcagactataggcctgtgccaccaagcccagctaatttttttgtacttttagtagagacggggtttcaccatgttggcctggctggtctcgacttcctggcctcaagtgatccatgcacctcagcctcccacagtgctgggataataggcatgagccactgtgcccggcccacttacacattttctatggctacttttgcacaataatgacacagttatttagttgtgacagacccaaggcctaaaatatttactatctggccctttacaaaaaatgtttgctggcctctcttctaggttataaagcaaatctcaataaatttctaggggtggaaattttacaatccatattctgtgcctaaaaagctattgacaacaaacaacaacaaaaggataattggcacaaacctctatgtttagaaattaagaaatacacttctaaataactcatgggtcaacaaaatattgaaatggaaatttagcaatatgttaagctaactgataaaataagactagtagatattataacttataccttatagcagtacttacagggaccgtgtagaatgaaatgctcatattagaaagaaataaagactgcaacataatgagataggcacccatctcaagaagtactgaaaaaccaaaagaatcaaacaaattcaaagaaagtagaaggaaagaactaataaagataaaagtcatcatttaaaaatagaaaacaaacatacaataaaaaggagaaccaagatcgacagttagttctttaaggaaccataaagaaaaaaaaaaaatcatgtcctttgcagcaacatggatgcagctggaggccattatcctaagcaaattaacataggaacagaaaaccaaataccgcatgttctcacttataagtgggagctaaacattgagtactcatggacataaagataacaacaaaaattgtataaaaagatggcaacaacagaaactgggaactaccagaagggggagggaggggagcaagggtcgaaaaattaactattgggtagttagtactaagctcagtacctgggtgacaggaccattcataccccaaacctcagcatcatgcaatatacccaggtaacaaacctgcacatgtactcctggaatctaaaataaaagttgaaaaaaaaaagttcgttctttgaaaaaagtctaatacaattgacaggtctttggcaaggtgaatcaagaaaaaaaaagcacaactaaataatattagaaacaaaaaggaatccaactatagatacttagaaaatatacgtagctttatgcctataaatttgaaagtttagatgaaatggccaaatgagaaaaaaaatacaatttagcaaacacagacacaagatgatatataaaagctataattctatgagctttaaagtagatgaatcatagtagaaaaaaacattctaacaaggaaaagccagctcagaagccttcactggcaaattctataaaatcttcgaataaccatattcaaaataataaaattcaaataaaatcttcgaaagaacaaataactattattttggagaaacttccatagtataggaaaacagaaaatatactcattttattaggctagtacaatcttaataccaaaatgaggggccaatctcacttatgaacatgcatacaaaaaccctaacaaaatatcagcaagccaattccataatgtgcaaaaataacaatatcatgaccaagtcgggtatatcccaagaatacaattttcagtaaaaatcagtctgtatacaaccacattaatagattgaatgagaaaagtcaggtaatcacctcaaaagacatttaaacaagtgtttaataaaatccaaaatccagttaaggaaaaaattcttagcaatcctggaatagaagggatcttccttaatctgttctagaatacctacagaattccagagcaaccactaaatggtgaaacattgagaacttgatgtgggagactgtgaaggagaaaagaaatgtccccctacatcacatctaccaacatttgcactggagatccttgccaatacagtaatgcaagacacaaatagaggactatgaattagaaaggaagaaaaactgtcatttttttagatggtataactgtactcacagaatctccaacataatctatggcaaatggtcagaattagtaagagtgtttatcaaagtcaatggatacagaatacattcaccaaaaatccaaatgcattcctctccaccagcaacaaatggttagaaaaggaaatattatttacaacagcataaaaatataaaatagatctaacaaggaaagtataaagaaagttacaaaactttattcagagatgttagtttaaataaatgaaatgatagatgtgttcttggactagaagactcaatattgttgtgactttccttcctagactgacctatggatttaatgcatggcatgtatgtatcttgactagctgattctaagacatttgtagaaatgaaattggctaaaaaaagccaaagaagaactgggtagggacttgccttacagcaagatatatcccaacctgtggtaagaaatacagtatgagtaaggcacacgggaccagtggagttacaggagggcctacccacacagcctcctgcctgtttgatgactgctgaaaatcattcaccaagctaagtgggatatattaccccatgagttggggatgctgacccataaggtatggtatgtccttttttcctatccctatgatgatagtctctgactttagttttagtacttaaggagtactttagtacttaagtacttcctagaagaagatacagtgttctcagtgggaagaggaaactgatggtcaggtattttaggctccacagaccactggacactgaggcagtaaaggaggctccaggatagacagggtgagtggtcctgccagggaaaacagtgctgctgctgtacaaagcggatgcggaagggttctcatggagcactcactcctgatcccatgctcaatggtaaatttaatggaagacaacatcaagtatcagtcctaatcagaaccttatagcagtatttcatcctgctgagcatgtatatttcacaaccacctaaagtttctgagtgactcataagtgccctctcctaacatgatgaccaaagcctggggattaataagattttccatgactgctgacaaactggatttccttaccacctgcagattaggagctgcttgtggagcccctatcatgtgttccttgactaaagaagtacagtgctcaggggaggcacacacctagaaggtgcagcccaaattaatttctttctcaggtttgggtccagatgaagacacttcatatccagggactcttcttggcaagatactgtgaaagcaaagagagccttttgcagcaaagtgataacgctgaagtccacgtggcaacactagccagcatgccagcacaaggaagtgcccagttgttggagcaaagacaaaaaagaatccttaggacacagaaaatgatctgaaatacccatttgatttgtggggatggggattaatctttcaaggatgcaatgcagacatcttgatggtccaaagcagggcaatgaacaactgaactctgttccaattcctcacagataacctccagcctccaggattggaatattgccatggatgggcctaccgagaggcaggccacattgaaaatgacaaatgaagaatgtgcgtggcttaacttacccagtttggtcagttattcattctgctaaaaaactgcaagtattgtgttcataacaatgatatggctgtgatttctgtgtccagatttttggcactgcctttatcatgcaagaagtgggtaacttaatacaaaggtctagaattcaaatttctccttgacttcacacatatacctataatgtgaacacaggatgtgtacacagaatataaaaagcatctgcatacaggtgtgaaaactgatacctctctactcttaaagagattcagtctactgggatttaggatgctggacttggtgccagaatcaagtactcttggataaattctttatgctcttatcaactacatacatatttggagcacaagggcagtgttgtctgccctgtgggcctcacagagtgactaaaaggttcaaatgccctaccaaccccgaaagcgtgttgcaaatagtactgtcctaatgagaggcaaggtaaaaaaaaaccaaacaattttgagatatatgtaaaaaccttaagagaaatgtaaggtatatttctgagaaacagaatttttattttcctacattcctatctctgtataatataaatacattctctaaaataccagaagatagcttttgggaaaaatgaatactcagaagactctaaaactttgtctgaaaattctaaagactacagtgaatctttctgtgtcaaaaggggcagagatttcatgtaccatctgtttatttgcatcatttgatcaaagttctgttaagggctgtgggggaatacagatatgaacaagtcgaggctctgaactgtaggtagtttgcagaagaggtaaaacaatgtattcaagaaggcaaaagggaaaaaaagctttagggtggacgcagataaaatattctgaagctacagagagttcttttctagctgagagaagccatggaagtcttcatgtaggaagtggtcatgacagtgggtgttggcagagattcacggtgggaagagcggagcactccagacaaatggtaaaaataggaatgaaaagatgaggtgggtctggctctcttttctagcgcagggttccccaaagtgcactttaagagatactaatttagctgagtgctagctggtttgtatgaatgctgtgcctacagttaatgattaaagtattacagataaataaacagaaagactgtggacagaacatggcaaaggactgcacagagctcctgagggattcctgagagcaaagtgaagtcagaggtagggccacaaaaggaagtgaggcaggcatagaagcctagactggatttgagaaggatggaaagctctggaataggtatgtacggaaatgcatacagataagagaaaaggctgaagaacaggtatgggaagccagatgatatgggacttgatgaaatgccctgcagaaattaccagcttgctctcaagactctgcactgctgtacttgcctactcctgctcatctacccacatcatgtcctggtcatccaaatgaaagcaacacagagcaccaggtaagtttcccatcttttacttaatggaaaggctgagctgaaggtacattcactgtgtgtgtcagtaggagataagatctggtgggtggtgagaattggaaaggctgcagatctgttgggtgttcctcacaagttaggtggccagaaaccaaaatggtaaagtcaggtaggaaagagtacatgtttttatacgtggagagaaataccactgcccatcaaagaatgatggaaagaaagggcctgtgaagtcaatagtaattgcaatcatgatcacaatctctaaaacagatcaatgtaactggtagggaatattgcaacagtgaattacaaaataattttaggttaagaagccaataagaaaagaaactgttaaagtttctacacacatgagagaatgggcaagtggagggttgccagtgggttgagcagaccagagctgctttccatgtaagtgcctggccaaggacagtcgccctgagaagcttggccccagctgctccacaggtaaaatttcctcatcactaaggcatcaggaccatccatcaaggctcaatctgtacgacacctgtggaacctcatactgcagggcaggtcttctcttggtgatctgccaataacaaagcactgacctcatgcatcagggaaaccatgtgcaaccccctaaatcctgtgtacagacttaggaaacagaacttcttgagggcatttcattagaactacaagcaacatgtttttcccacatttctaaccagatcccttaagtaaatctcagacaatcaagaagttctaacgaataatgagagaatcaagtgccagacaggaaataatgaaggataaaaatgagaggctaaaaggggaaaaaaagtggtttctggatattcagagagagctatacggaccttgagctgatcttgtactctagtgatgctggtgcacaaacacaagggtagggacgctatcaggggtgtcctgcataaaggtcagaacagacaacctaaaatgcttccttcacctctgagatctaggattcaaggatctgacacagtttccccctctgggaaattcacagttccacagggattatgaattaagagggtgtgtttgtacttgtgcatttatgcttgagatgtcaaagtgggcaacagataaatctgctaagatattgtaccaaaagacagtaattttcccgttgggaaaaacaatagtagtcacattatttaccagaaacaccaaggagtccatgcactgaacattttataaacattttatgaaaagtaaaatgtgttcaatcctaaatgtcttcttgtgtgttctatggttcagggtgggatgtgggaaggggaaggccatgcaccaccctccaggaacacataactccatggaactccatggagcaccagcaagcagcactctctgaggagaggctgctcaggaaatggttcattgggcttggactagtttcttgaaggtgggaaaagactgatttatattctattttgcagagcctgagccagacacggaaagggatttccaaatagtaagaaagtcctcttagggaacaatagggcatctccatgaatatattttaaagatggttcatcacttaattgggcctgtaagtgattctcctttgatgcctttggagtcaatgattcttagtgattagagatgaaaataatatacataatagatattttttgattataagattaagataaaataacaaaagaatcatagacaaggggtttaaaagcccaggaacatttcatttttgatgatgagcccaatgactgtgatccctaattactgaacctggttctgatctcagtgctcaatgtacagtatgtaattctcacaacaaccccatgaggccagcactttatccctacttcatggaggaagagatgaaggctagaggggctaaccgatttgctgtagcttaagcttgtgcaacccatggcctgtgggccacatgcggccctggatgactttgaatgtggcccaacacaaattcggaactttcttaaaacattatgagatttttttttttttttgcaattttttttaaggtcattagctattattagtgttagtgtattttatgtgtggcccaagataattctttttccaatgtggcccttgggatgcaaaagattggacaaccctgctctagttcatgatttgggccaactcctcactgtggccttgcaggttctgctatgtaatgtcccctgtacccctgataattttccctgctctgatgttagctccatctgatattaatatagttattccagctttctctgattagtgtgagcatggtatatctttctccacccctttacttttaatctgtgtcttcacatttaaagtgggtctcctgtagacaacataaatagttgggtcttggcttctttggcacccactctgacagtctcttttaactgatatatttaagacgactgacatgtattttattcattgtccttattgttttcttttttggtcttccactcatttgctgccttctctagttttaagtgagaattttatatgagtccatttttttcctctctcggcatattataattcttttaaaaacattttattggtggttgccctgagtatgaaaatacatttataactaacccaaatccactttcaaataacactatactgcttcacagatagtggaagttccttataagagagtattcccaattcctccctcctatccttataacattgctatcatttattattcatccatatgctataagcatgaaatacttgttgctattactatctggaacatattgttatctgttagatcaattaagaataagaaaagggctgggtgtggtggctcatgcctgtaatcccagcactttgggaggccagggtgagcagatcacttgagcccaggagttcaagaccagcctgggcatcatggcaaaaccctgtctctagaaaaaacacaaaattagccaggcatggtggtgtgtgcctgtagtcccagctatccaggaagccgaggtaggaggatcacctgagcctggggagatccaggttgcagtgagccatgatcatgccactatattccagcctggacaacagactgacagtctgtttcaaaaaaagaataaaaaaaacagatttcattttacttatatttcttccttctctaaagcttttcccttctttaagtgggtccatctttatgacttctataatttttttttttttttatgatgaaggaaaggcaaggcaggtctactaatcacacattccctcaacttttgtctgagaaggtctttctccttcacttttgaaggataatttctctggatacagaattctaggttggtagttttttgtttttgttttttcctttcaacacaataaatatattatgccactctcttcttgatcgctcagtttctgaagagaagccctatttattacccttgctcttctgcagctactggtgccagcataggagccctctggctcctttcaagattttctcttcttttttggtttcctgtgctttgtatgtgtctaggtatagacattttgatatttattctgcttggtgttcctggtgcttcctggatctgtcattaattttgaaaaattctcagccatgacaatttccaatatttcttctcctttctcttccttgtattctcattacatgttgttacatcttttgtgattgtcacacaggtcttggaagttctgttcagatgtttttcaaccttttctcccctctgcattccagtttcacggtttctactgacacatccacaggctcacaattcctctccttggccatgcccagtttactcatgagcccatccggcattctttgtttctgtcatagggtttttggtttctagcatttcattttaattatttcttggagtgcctatctctctacttacattagccatctcttcttatatgttgtccactttttccattagtatccttagcatattaatcagtaattttaaattgtcaatctgattattctaaaatctctgccatatttgagtccggttttgatgcctgctctgtctcttagaattgtttattttgccttttagtgggccttgtactttttgttgaaagctggatatgatgtattgggtaaaatgaactgaagtaatcaggcctcaaatgtggggttttatgtttaactggctaacaggccgtgcttcttgttttctatagctgtagatgtcagaggttaaaatttctttgaatgaccttgctgttatcacccatgttatttgtaggcttttttacataacttttcttaaataagatctgggatgtgcagttctttcagctgtactccctgttactatacaaaagccctcctgatatcgtagttagatatggagaagaggaagcattctatagtcctaggatttagtctcagtctttcagtgagcctgtgcccctggactgtgaccttcaaaagtgcttttcagttttgttttcttgtctccttccaattccaacttagatgaggtaggagactagaaggcgttggtattaagtgtttccgttcccccaggccagacaggctgtgtgaaaatagtttctcttggctgggcacagtagctcatacctgtaatatcagcactttgggaggctgaggtgagtggatcacttgagttcaggagtttgagaccagcctgggccacacagtgaaatcccatttctccaaaaaaaaatacaaaacttagccaggcgtggtggcatacgcctttagtcccagctactcaggaggctgaggtgcgaggattgcttgagccctggaggcagaggttgcagtgagctgagatcgtgccactgcactctagcctgggtgacagagccagactcggtctcgaaaaaaaaaaaaaaaaagtttttcttgagggcagactttgttaagaacaaaatactttgggtatatagtcatacctaggtatatgagggggactggttccaaaaccaatgccccacccctgtgcatgccaaaatccaagcatacttaattcccacaattggcccacaaataccaaaagtcagccctccatttacatgggtttcgtctcccacaaatactgtatattttccatctgtgtttggttgaaaaaaatccatgtgtaggtggacccacacagttcaaacccatgttgctgaaaggtcaactgtatttccaaatgactgctttctccctttttctgccaaagaggggattttcctccagtttttactgtgagaacctggtaggtatcctagaggtagaactcacaaaagtgtggaggattgtcagccagccccacttgactctatttaactctcagatttgcccacactaagcctcctgcaattggtgaattacaatttaagtattcctactgtggtattggtttcccagaggtttctgctcctgggcttctgttctgataaggtgtgcttctctgtatctgcctgtctatctctctaactttagggacaggggtttgcctggtcatttcaattctctgatgaatctaagaactgtttgattatcagttaactgctgattatcagctcgttctttttcttgctgtgaggatggcagtgatgactatcaagctccctacatactgactggaaaccagatgtctccctatctgaattaaagcagcctccttcctgcccattctatcactctgctttactttctttgaaatacccattgctataagagtctcagctcaaccatttatttacttatttactggccttctcccttactaaaatttagattccaggagagtgggacccccagcccttgacacagtacctggcatgaagcagcctcaactgatagatgtttcctgcttgactgaatgaagcactcctgttcccaagggactaattgctgggcattaaccaaatctgttgctcctttcgacatttctagaataagatctcttgtgaccatctgtcttttgcttcatggagatgcatgaaaggccaggggaagggtgacgggagtggccttgggatcctgagtagccttcttccactgccatagttttgtttggtgggtttgaagaaaatgttccacaattaaaacataaagatttaaaaactgcaaagattgggcaaagctattttgatatcagcgtctacagcacagaggaagcagtcggacctatgagaattcaaatgggagcaaagaaggaggagactgttagttctactagtgatgactaataatgagctttccctctacgacagtactggtagaaaacacaggcgtttcagttccaaacaggaaaattaagaatctactcatagtctaagatcattcgtgttgccaggttcaaataagaaataagaaaataagaaagaataaccctttcttccttctatctttagtaacaccacacttcaaagagtttatttaaaaaatattctatataaaaaaataagtgtacttcctcttatggcttatactaaaagcagtccagtaatcagtgaggtggagttgtaatgaaagtattcatgaaaaaaaaaaaaagagcaaaaaacccaacaacaacaaactaatacatttcaagtatagcatagaaaatactactgtaaagataaattatctgatttggggcaatgagcgctctttccttttcacagaaaagttctgtgtgctctggacacccatcctccttgctgggctgagtggctgacattgtgtgcacctgtgtgcaggaacctaggcagtcgcatgccaaggggtctggggagtgtgctgtctcttgagccaaaaggcccttcctactgagtagctcagaggcagagaatgagagctgccttgctttcttacattaccatttgccatttggtatgcatttacacaggctggctctggctggccaaaggagagaagataaagcaaataagaagaagatgtatatgcaaagaccaacttaaaaaaggggaaacaacgtcaacttctgaggaaaatcagttgagaagaaattctcaaaagccaaattgttgtgaaagataaaacagcagctaagagctaataatagtaggctatagattttcttccatctgtatcaaggcttattgtataaataaacgttctttagtattcttcagcaactgctcgtgggtgactcagtctttcaaaaaccggacaaaaggaataatacaaatcccctgtatctagggaattcctctaattagaagtggcaatgaattagagaagaaatttgattttaatttaacatctgcaaatgacagatgccttttcacatagttctcaatgtcattcctttactaaaaataatgctaataacaataataataaattatccaaacagaacataacatagtaatccatttaataacctattttagtacattctggttgtttggtattttcaatgatcttttctaaataaataattctttgtatattcaaaggttaacaatttattttccctgagaagttcccagagcattttaaagggcatgatttaatcttaaacaggttagttggctgtgattgggataaatatttaagaaaactgcacatataaaatgaaaagaaagaaatttacataaccatgttgcaaagtcaaacactctccctataccgtgaggccacactagtaagcttaaaagacttcctttcaaactcagtgccaatcctaggctcctctcagcctcccatgtgcaaatgctcttgtaacttctggcacaacagccttttcccagcatttctgggcacctgctccaggtacaggtcctgggctagatgtcaccctgaagagggatgcatgaacacacatgaacacacacacacacacacacacacacacacacactcacactcactcactcacaatagctgctgaaccttcaagagagccagcgactacttccatgacgctctggggatagtcaggacaacttaaggaaaggtacgggcagctaggaacaagaggatccaaaaaaaaaaaggcatttagaatccctgtaaggactacagagaagccttggttctcaaccagcatttcacagctgaggaagctaagattcaaagaaacggaaagatctgcccaagacacctaccatcttgtggtaggcttagaactggaactctggtgtcccatctcctgtcttactacttcccctcctacgcttttcacaaatcactgaatcactatcatttttttctccatgctcgtatgtaccagggctgagtaagtagagttcagaggacattagcatattttccatttacaaaagggacactctggttgaggtgaagaggaggacacttcaccaaaacttcctcttgtctcaactgctcctgctcaaggctgcttctgaacacctaccctctggtcaactggtcaccagccagtcactactatgcctggaaataaacatgcccaaaccactaaaacttaccttcgcaaatttctgaaggcaaacactttgaacaccaatattactttccagatactgaaagagagggaaagcagcacgggtactcactgcagtgtggaagttctatgaatcacttttctgaagaacaactctggcattttaacaaaccccttgaatcactcacattctgctctatatgcaagtctttccttgactgctgacttaataataaaagctggaaaaaacataagtctaacaataacacatttcttttctgtgaccaaagaatgattgtgtcaatgtttatggagatggacttattttgaaagtaatttaacaatggaatgatgctgctaagcacactgattttttttttttaaatgaaaaaaagaagttcaatacaaagctcaagaagtgaacaggcccactcagatgagagggttttatgcgttcacacaagcacacccacacttcttcaacataccatttcacaaatgctgtgtattattaagaggaggcggattctgccaggcacataatttgtatatttaagggaggtgtatggaatgaaaaagcgaaatatgttaaatttcaaaggacttggaagcaatgctgcctgtaagcttgtattacaaatagccctacattattacatacgctattaatgaggccgagtgaatgaaagtacaatttgaatatgcatgactctacccaatgagcaagacttttgtgtactgatgaggtttttttttctcccaaaaaaggattaaaattattcttagaggagtatggctgcccagagaacagtaaaataaatgtacttagaccacagagtcatactatactcagatgaaatacacaggtgctaaaagaatgcctttgactctacctacaattttggaaacatgcatatcctgtccttcaaaaggaatattccttaacttcaagcagctgcgtcattacaatttctaagaaaaaaatacggattttggtggagatccctaaaagtaggcaaggttaaataaaccttttgagtacaaagccttcccttccacagtaaggagcactagttaaaaggctggggaatgggtaaattattgtaccaaatggctgagaattaatctctgctgactagctgtaatctaacgaggcgtctgtgtcccagggagcccgcagcatgtccctggcggtatgtgcagtgtgtcgagtctgcgtggcaccctttgtcctcgctcacaggcggcctttcccctcattgtccgtaatatcctcatgcatctgggacgcgtggaatgcattcatactaacagacttaccattgttttctctcagaagctttgttgagcaaagactgcatcacggttactgataattatattgcttaattaatcaagacaaaaaaaatttgcaaatcattgcctggttgccaagcagggagataaaaaatgacaacaatacaagctgaagcaatataacaaaagtaacagctatctgatcagaaattcttatataatgaagctattaatgctaaatcggttaatgttaacattgctccaggtgtctctacttagatgcaaacaaaaaggctaacattatggatataaaaggccaaatgttgccatggattctgtaacctgatagagaggacagccttttcatttgattagggaatgcaatttaaataccagggactgaagccaaacaaacagactttccctccgcaagcctcttgcattcaccctggggtcagtggttggtgaacaaaaggtcagccacacttgccctggaaatgtctggattaattttattacattgtaatggtttgtactttaaatgtaaggataatactaaatttccagttggccattattctcttcttccctttaggctttttgaattaaaatattaagaaagcgatttgctcaattcatcttgtcagaatttatagccaaattcattaaatgtgcaaacattttataagaaagtttacaaggtatgttaataattatattcatgcattataagtgtactatctttttaaaaaatcaaaaaaatcacttttgattctataaagtgaattaaaatggcttgcatgttttttacttaaaaataaaggtgacatttttaggacattaaatgacattttagaagcccatgttgaaaatgagctaataaagccaattaatccatactaaatattaaagaaacacatttcctctttttgaaagctataagacactaaattcactggttctcttatattaaaattttcagtttaattctttaaagtagtgctcttcatggacaaatacaaatgttagcactaagagccattttcatacacaaaactgaaaacttcacgcacatggagatcagaataaaaaatgatgcaaatatttaatatgaagtgacttttggcatctgcgttccctcaatagaaaagagggttccctttatgtcaggctttgcaacagccagaatgggacttttatgaattcaggagttgacccacaatgcatctattctgagaataataagcatgttaaacttggaattcattaagtattctctctccatagtagtaataacaaaaaacaacagcaacaataataataataatagctaacacttaagtagcttttactctggaccaggcactgtttgaagcactttctatttattagctcatttaatcctcacaactttaaccctttagattaggtcataaatcccaatatgaacaataaatctgttgcctattatttcaaagctttaaaagagagttttcagaagggtaactttcagctccttcaggagaacaacttgaaatgaaaatgaagattatacatactatcaagctgaaaaacacaatgtcattcctcttgagggatggcttaatatgctaatgtttaatttaagaactttaaaaacgcccttctattagtaattctaaaacaaaaacaagtcgctacataaagcatggctaaaataccactaaaggtatgacaaggatcgaaactgcagccaatttagtacacagcacacagatcattggattgttccagctcttcccatgatcaataccaattgacatggctgaattgattctgcagcaaggtgctccaattgttgaaactcatcacgtgggccgtgctccagagtcccggcctcttcgtggacatgcctgcaattctgcaggattgaccccattagcacagtcagaggcttggcaagtgcccgacaccaggcaaggctggattccatacccacggttctccacaaaatgctagatgtgatatggggttccttcaactcttattattaatcaacataaccaaaatttcaagatacaatttttcaaaagtacaaaatttagaaaacttaaaacatttacaaaataataaatttgacattataatttccaaagaggcctagtaatacaataatacaattttgtgctcatgatgaaaaattctttgaaaatcccaattcatatttaattcctataaagcatgcataattcagatatatgtaagacattcaacaactggatgagagtcccctttaacatatttgtatcactgattttcaatgacaatgaatcacatggcaaatgctttatgagtcagtacaacaatgcaatgaaaacgtacctcaggtttcttcgttatcgcgatgaagaacatgtgattcttcattgggtaaataatgattgaaacatctccaaaggcagttgggataatacccctgcggtagtctctggagtgttcagaccagacgatatggacctcgtcattccccaagtgacgaagctgcaacagcaaattgactgtttattaatcagggtgataacagcagtttatgaggggtcatggcttacaaattgaattataaaactcaaaggccaaaaaaatttcactaccaaaaaaggctacaacattgatgttcttctgtgaggattttaaaaagcacaagtgcataaaaacacagcctgtcttcttaatgtgttggtaccaagataaggcatgctagcttcgcaggcacattacagctggatggggctgaggcctttgtaagaatttattttctaatggaattttactcctgcgtcagagtcctgtgctttatattgctgaatatgtttctaaacaattaacaacacgtgtcttttattccacattgcagttgtgctttataagattctcaattcaatggttattatgaaaataagaatatgaacataagagaacataagccactacaacacaattgttaccaaatgtataagaaactagatttgtgacaaacctttaagaaaaggacgtataaaattacctttgcttaggaaatgaataactactgcttaagtctgataagaacactcctacctagcatttaaggagtgcttactgtatagaagacatgttcacacatactatctcatttaatcttcccactaactctctgaggtagatgacatcatcttcatcttactgtacaaaaaagaaatgggcgctcaggaaggtgaaggcaccacctacccgaggatgcatgagtagcagtggcagagtgggcccgggacatgcactggggcttccaattcagggccatttccactgtttcaaagctacctaagcctgcacccaaagttactttactgtcattgcttagtagtgtagcccacttgttttatcatcttatacacaaagaggctgtaaagaacaaaaacaaatcacagactcctggcgtctttgaggaggccttactagaaagatctccaaaacaagaccccttgagagttctttcaggcccaggctctgtcaggtgtaagaacacccttgatcaatctcctgcacgatgaccgtaccatctcaagctggagaaagctgcacacgaaatcatttaagtgacaaagaatcaaagtgtgactaaaagaaactagattatgaagattaaaatgttggccaaaattgaagttctgaaaccacaaaagctggtaaggccctctgacatcttctgggaatttgagattctcgttctctcacgtggaactgcagaaggatgctctctggcaccatgaacaattatttcttgcttccttatctaacagatgaacattaaaaatgactaaattcagaagcagtttaataaaatagagatgtgtcaaatttaacatttttagttttgtcttaaagtattttttaaaaaggtgttctggaatactatgtatttaaaacgtgttagcataaatacagttttctttagactatttgaccacaaaaagaaaatctgaggtgaccccaacatagcctcttttctgtttataaggttacaaaaggaagctcatctgttgcaatgcctgtttattcttcactctctcatacttctgggaatgactgtacaggccaattatttaaaaagtgacctgtgcctataccattgtacctatactgaagggtgcacgattcaactgtgtttgaatgtgggctctgggacaaatgcaactgcgggtgctgagcacaagtcacgatgatccagaacaatttaatggcatctccgactttctaatggcaaaattacccagtacatcatttttttccttcctccttcccacataaaagtaaaagaatagcaggcaaaatgtatagccaaccccttacatagttttaaacaaaatacaaccctgggcctcctagtagtgctgaacatctctttatatttctccattcctatatttgctacagcttttttctttttcctttttaataaaacatgcaaagacattacaatacactcctaaaattcagtccttttgaagtgaaaacacggtagccagcatcaccaagaacctaatataggtatgttttcggggaaatatgaatagtatctaactggaactgtaggaggaattgagacctgcagaaagtaattgtgagaactggggctgtcctagagttcacacagccctcaccctgcaaagacagccagcttcagggtggctctgggtcccttggtataatgcttgcacaaatgtctgaatggaaacactcacctactaaacacccctcaaacgtgctgccaccacccgatgttggtgctctagtatctgtgatagctccttttgatccacaagtattagttgcaaaacattgactgtgaggtaataccgtgattattgaagttttgtagttactttcccatttcaaattgggttactcaattacataacctaagtaagtatctcttaattttacttgcatctgtatactcagaactacagcgagggaggttagtttcacactaacagacccattctcccagtgtggcaattctgtaattaaggaagagcaatttttgtgtggtaatgatatgatattcatcttctcatagctgctttcagtggcacgtgactcagacttctggatatgtcacagtttaattagctaaatcacaaaactaaaagctaaggccatgggagcaatcggctgataaatctggagcaaagggcaaaatatgccttcttttgcctataagaaaacaggtaggtaaaataaataaaattcatctgggcaaactgtcaaccatgtcagaacatacggaatactctggatggctcaaagtgttgcccaatttaaagaagagtccatcattgacacatcattttgtgagtattgaagaactgggattagaggccctcaaattagaaacccatcagtgagttcggtgagtgcacacaagtcaagttgatctggttcctgtgtaactggggaagaatgatgagtctccttctggaatggagccggtgtttatgttagctactccttcaactgcacaacaggctccacaatggctggatacttatcaggctcagaacaaatgctcagattttaagtcttaagaaatcaatcccggacccacaacttttcatcctaacagagttttaaagtccctttgcctaagccattctgtctgttgctgctgccaggctgcacgccactggtgacaccggtcatggtacacacctaataggctgacctcctttctcgactaattgcattacatcgccagctggctccagaaggagtcgtctgtttgattgaagaattcctgctcctcagtgggcccggctgctacttttactaagtaacagtcaggcctgacatccccattgttcagctgacagtgtgcccatcctaaaatctaagttttatttgtaaattaaccaagaaacttcctgccagaacagcgctgcctggagactgataatgtgggcctttcatcccttttcactcgtactgtatcactgccaatttgttttttatgtggctggccagcctgaggctataaaagccttgtaagacataagtgcaattatagtcctggagtcaaatgaattggacaaatccaatagcacagctctgtccccactctgcaaacccctacagcagttagattagctgtgaaaaatctaatctagctagagctaacaaatttctgcagtgaaggatcaagagttcagtatggggttgcaactggattgcagaattgaaaaagtccccccatgatgggggcagaagagagcatgaatcactttagaattttgcagctcatttttaagctgttagggacaatttagttagaataagacaaggaactgtgggctgctgttactgtgactgatttttagtctagctgtgagacatctgataaagagagtttatcactaatgatgctaaaccttacagctgcaaaaggtatcagctgaattttgattattacagtagggaatcattcaaccaggccaagtcttagaacattatttacagcttggcattttatcaagaaaacatgtcttttctcaaaaaagaaaaaacagtcctactttacttaagaaataatttaaaaaatattttatatataaattttatcttttaacaaaataattctcagtcataagaaaattatagaatatggtgacacatttgcaaagcagaaacaatttacaatgtactgcaaataaaaaagatgtgtgagcccagcttaggatcctggtaagctacactagagtctgagatcctggtgaattcttggagggcagagttccctttgctgagagctctacagccaggggcagccatcaaaacccaacactgaggcagctcctccaagacgtgtgggaaccagcacgtggtcagcgcttctggctgtagtactgccacccccaggaggtcattatagcatgctggggcaggagagggaaaggctgctgagtttttgaacgcaaattgtactttctacatctgagacacttgatcactacggaagttgtctgtaattgggccatgacttgagttctgatgtttcacatgcactgctgcccatcatatacaggcacacctcagagatattataggcttggtttcagacatatccgcaataggttttttagatattgcaaatacagatattgcaataaagcaaatcatataaacttttgtgtgcactgggaaagcagtgtgcataaaacttatgtttactatagtctattaaatgtgcaatagcattatttcttaccatatgtatattaataaaaaaattttattgctaaaaaatgctaatgattatctgagccttcagtgagttgtagtctttttttgctggtacagggttttgccttgatgttgttggttgctgattgatcagggtggcagttgctgaaggctggggtggctgtggcaatttcttaaggtaagataatgaaattgccacattgattgactcttcctttcatgaaagatttctctgtagcatgtgatggtgtctgacagcattttgcccacagtagaacttcttttgaaattggagtaatattttcaaaccctgtcactgctttaccaattaaatttatggaatattctaaatcttttgttgtaatttcaacaatgttcatagcatcatcactgagaacagattccttctcaagaaacccactttctttgcttatccataagaagcaacttttcatccagtcaaattttatcatgacattgcagtaattcagctacatcttcagtctccacttctaattctagttctcttgctatttctgctaaatgtgcagtgacttccttcactgaagtcttgaatcttttaaagtcatccatgagggtgggactctatccaaactcctgtgaatcttgatatcttgatctgttcccatgaatcacgaatgttcctaatggcatctagaatggtgaatccattccagaaggttttcaatggtctttgccagatccatcagagaactcactccctatgacagccatagccttatgaaagttcttaaatagtaagacttgaaagttgaaattactccttgatctgtgggttgcagaatatggatattgtgttagcaggaatgaaaaacaacactacatctccttcagagctcttgagtgatgaggtacattgtcaatgagcagtaatactctgaaataaatcttttattctgagtagcaggtctcaacagttggctttaaatcttcagtaagccatgctctaaacagacgtgctgtcatcctggttttgttgttccatttattgagcacaggtagagtagatttagcataatgtttaagggccctagaatttggggaatggtaaatgagcactggcttcaacttaaagtcaccagctgcattagccctaacaagagagtcagactgttcctttgaagctttgaaaccaaacattaacttttcctctctagttatgaaagtggtagatagaaacttcttccaatagaaggctgtttttactacactgaaaatctgttgtttagtgtagccacctccatcagtgatcttagttagatcttccagataagctgcagcttctgcatgagcacttaatgcttcgccttgtgctttcattttatgaagacagcttctttcctcaaacttcatgaaccaacctcggcaagcttcaaacttttcttctgcagcttcctcacctctctcagccttcataaaatttaacagtgtagggccttgctctggattaggctctggcttaagggaatgttgtggctggtttgatctgttcagaccaccaaaactttctccatatcagcaataaggctatttcgttttctttatcattcatgtgttcactggagtagcacttttaatttccttcaaaaacttttcctttatgttcaaaacttgggtaaatatttggttaaagaggtctagcttttgccctatctcagctttcaacatgccttctaatcattcctagcttttgatttcaagtgagagacatccaacttttcctttcacttgaatactttgaggccatcaaggggttattaattggcctaatttcactactattgtgcttagggaataggaaggcccaaggagcggaagatacataggggaacggccggtgggtggagcagtcagaacacaccgaacatgtatgaattaagtttgccatcttataagggcagtttgtggtgccccaaaacaattacgatagcaacatcaaaggtcactgattacagatcaccatatgagataatgataataataatagaaatattgtgaaaattacaaaatgagacagagacacaaatgagcatctgctgttagaaaaatggtgccaatagacttgtttgattaagggttgccacaaatatccaatttgtaaaaaatgtaatacctgtgaagtgtaataaagtgctgcacaatgaaacaaggtatgcctgtacatagtccagacatctgtggctgcagtggtgaaaaagcaaaaccgtacaataaagaaataaagcaggtacagtgaggccaatcggccaatataaagcatctggctaacggggcagggggaaaaaaagaatcaattagaccaatgggcaataatgagggatgatggtcagagacatcttcccaggcaccgtgctaagcaattttataggaattatctcatttacttcactcaacaaccctgtaacataggctgtgtttttaatctcacttaatagatgaaaaactgaggcacaggttgatgaaataactgaatatacctctgatccctggtctgcctgtcaccggagcctggctataaccaccacagtagactccccagtggccagctttggtcagcacgtgaggtgctgccctcagtcccttgcatttatgtggtagggagagagtaaggtggggattctaggttccccacctgctagcaggccaggtgagtgcatatcacagttgctctgagacgttctcctcatctggaagcagatctgattagaggcttccttcccagagttaaatgcctcttcttttaaggcgctcctcacttttaacacagggttgcctgaggcaaacatcctgcaggttggaaagtaaaggccaagttccctgggggaggttcctcaggggtggataaggtttcctttgaattctaaggaaaactggccacaaggcaagttgaagaataaaaggtaaggggcaacagtggggcggctgagcagctgcacacctgcacttatgttgacagatgctgccaaatcgccccgcagcaagcctcagaggggcctgctttcccagagccccaccagtacagggtcatcatattttgtaacctttgacaatctgtgagatcaaaaatgtcattttccatcaggtaatattcacgggagggaagatccaaaagtaataacatttaagacgccttctttccccaaaccttaatctcagggtcgtagagttcagagaaaccatctcagtgtgcgttctacccttgtatttgtctgtcctaggagagcctcacctacaaaccagggcagctaagaatggtgcccgaggagaccccttacctttttggtgagggaatcatctgagtctgacggcattcgagtggaaacatggaaaatcacttccacagttgaggtagcatagtaaggggccgtctgcccggtgctgccattgcgctgaaggccacccatgaacccacagtgggtggagagatccacctgacaaaggtcacaaagaagaaagagtgaggatcaaaaatgagctgctctttcactaagcaggactgtgaattcagaaaaaaaataaattattttcgtttttatatctttctttctgattacaaacaaatgtaatacaaagttagaccagattaaaatgttaaagaaataaaaaacattaaaaatgaaagtgctctacaatcatatcaactgaataaaaccactaccaaacttttggtatataatctctaacttttttcccacctgtatgtataaatgtatgtgtatatatgcatatatgtgtgtgtatacataggttccctattgatggattttgggggtttctgctttttcaaaacagaaagcacactcaaaggagtgtttttctaagatgttgggtcaaaaggtaccaatattaaaaatatttagcaatccttgctaaactgcctttcaaaagggttgaacaaccactttacaccactgccgaaagtttatgagtcataattcaaagttacggcatgagtgttcacttcttagtgcctttatccaaaatttttaacttgtcataaactagtattctttcagtaaaatacctattctaacatatatgaaaaaagaaatagaagaatctcttctgtgccaaatagagtaaacatatactctcaaaactctaattgataatgtatggcttaaaaatatattaaataacaactatattctatgacaaattagaagtagccttactagtgagaacaatgatttactggaagtacagtaactgttagactcaaacctacttgccttcttagtaaggatgtcgttttgactctgatgtactcttaccctgtttccatccctgccttagtccccttgctagcactgagctctcaaaggcacccagagagtttttcagagcacaggtactcaagaaactaataaaaaataaggaaattggccgggcaatcccagcactttgggaggccgaggcaggtgaatcacgaggttaagagatcaagaccatcgtggccaacatggtgaaacaccatctctactaaaaatacaaaaaaaaatcagctgggtgtggcggcgcgtgcctgtagtcccagctacttgggaggctgaggcaggagaattgctggaacccgggaggtggaggttgcagtgagccgagattgtgcgactgcactccagcctggtgaaagagcaagactctgtctaagaaaagacaaaaaaaaaagaaaaaaagaagtaaattattttagatatgttgatttccattttaactactcctaattctttcagattctaggaattttttttttaggtttatgttttttggggaaaggtgtgtatgtgtgtataaatgtatatatgtctgtatgtcagagtaccatttaataaagaaaaaataaactttttcaacatcaatcatcctgaaatctaccttagggaaataggttgatagctaaaccatcatggctattatattatattttcattgcaacttttgacttcatccaactctttcttcatcttttcacccatcaagtcattgacttcttcttcaatctccatactgtggccaaagccattgcttctctgcccacatttgtcttctcttactacaaactgtctatgtctgggagagcccatctgactattcagttctgataaaaagcaaatgaaaaaatattaagaggaaagttaaaggaaaacaaaagttcatgtattaaatactgacaagcaactaacagatgtcaaatccaataaattcttcaattccagaactctatctatgctatatttgaatgcaaaagcacatgtaaaaacttacacaatgtctagtttggacacatctttaaacagtgctggtcaataaacacctactgaatgaaatgcattacctcccatccaagtccagcaacaaagtcttcatatgcttggcttcctctttcattagagaggattgaacacttgtcttcttgaccttcagcaatgtaaaacactgcgattttgtgtgtctcacggctataaatttttaaatttaaaggagttagaattcttatatgtaaaattttacttcactactattaataccaccagcatgacttctaccactgagcttacatttactgagaacctgctagaggtcagtcagtgttctgagatggtctgacacatagtctcatttattcttcaaaaccatgctaaagagatgagtattattatcacctccctagtagaggtggttgaaaggaggcacagaaagtgaaacaaaaagcacatccagcaagctggggatgggaactgtcgcaaggccatctgcttcctgagaccataccctcagacataagatacaccgaccagaaggctggggcacaccatttggtaagttctctgtttttggtaaaaaaatatcttttaaagtatttcaaatacatataaattgtgaatagatctatgtgactgtccatatttaactctacactttaaggctactgggtggctctgtgattggaactataaaatatgccacgattttatgagaaaaagaagatccttccaagcgaacacacttaggtattttcttcatgaaggggtttaccaacttctgtactctgactattctgagggtgcctgacagggtggatagctatttagtggaaccccttttagccatataaacccttcatctgcttgttccaacatagatcttggatactctggtatcaaatcaagcaaaagtgatgtgtactttgaaaaaagaagccctgccattttctcttttgcacatctagcatactgctttgcatatagtaggtgttcagttaagtctctgttacactgagcagatatatggtgatacatttgaatgcattaataataaatttctacaaattataccctggagtaaagcgacaaaatacctgggcctagaccaagcatttggtgatagtttagagatgaaacactgttcttattcaaacggagctttgattacgaatcattcattccctagcccaatcacccaagagttttggtttttttaaagtttcgatgtccacttccagagcggttccaactttctcctttttttgcactacattctgataaatctcataggaataactgtcaagttcttaaatacagaaatattttttctgtcaaatttaatatttaattttttaatatttgtttagtatttcaacattgtaatttgattagatattgtattggtagaactgagttccatattttaacaaattatctaagatttccttctgtgtgagttatttctctacttaataatcagaactaactgattctcaattaaaaagtcatacaaataactggaggaagagagttctctccttttactcagcttattcacttcccctatggtttatatgcaataaacatacttggaagaagaattagaaaatacagaaagaaaagagaagaataaaaatcacttgcagtttcaacggataagcaaagaacatagccgttacaccattttaggatacacttttgcatgcacatatgagaagctactacattctgttttacaacagattttttcacttaaaatatttgtgaacacttttttattgtggtaaaatatacatatcataaaattcaccatttcaaccatttttttagtgtgaacacttttatatcatgtgcttctacaacagaggtttaatgattgtaacaacattccattatattaatatgtcatggcccaaatcttcatttaggttgctttcattttaaaagacattttcacgttatctttaatacatccttaaagataatctttaatgtttttaatcttttcacaatatctttttttgagatagtctcacttcgtcacccaggctggagtgcaatggcgtgatcttggatcactgcaacctccacctcctgtgttccagtgattctcgtgcctcagccgtcccagtagctgggactacaggtgcatgctaccacacaccaccacacctggctaattttttttattatttttagtagagacagggtttcgccatgttggccaggctgatctcaaactcctgatctcaggtgatccacctgccttggcctcccaaagtgttggctttatagggttgagcaccatgcccagccccaatatctctaatatgtccttaaaataaatttagaaaacttgtcctcatgcagcaggaagccctgaaagtgccacaccattcactgccctgagcaacaggcaggggacaccaatggcgtagaatctaactagcctattccaagagctataaaaatttgggcacttggataataacagaaaccataacctatgacctaaaagactgtctctttcaacaaaagtggagaagtatagttattcagtttttatctgaaggtctctctacatatgtaaaaactcctcagcatttaatttttctttgttttatagactttacatacataaaaacagcctcaggtttatctacaatgtttcagtttattctccttaaaaatctaagctgtttccattgcagctgttcctaagtccttgagccctcattaactcaatgtgagagcacaagagagctaagcctgaatgatgggctgaccaatgtgagtgtgaggaaagatgacctttagttgtaaacattcatcaaatttcacattctccaaaatgttagtaccacagagagcctgctaggatgcagaagctgtgtctggccttattaaagccatgcttttgaaatgataattagcaacatcaacagcacttcacatccataagaagcacaccaatgcatgaaggagcaggtaattcagaaacacacatacatgaaattaacaatcttcccttcctcattagaatgcactgttctttcttattaggaatagaccagaatagctcagtttccttgtgctgtcacatgaaaaagccaaagaaaagcatgattttaacatccacctccccatgtagtggcaagaaggcatttacatctaacagggaagcccactgtgatttgtatgtacattcatcatagcactgacaatctagaccatagctgcaagatagcctcaacttttccaaagaacatgttaagaaggaactatacatcaagagcagtgagatacattgatatcagaattaaacagaaatgttctaaatgaaagttgacagacaaggtattttcttacctgctacctgaccaaaatacagggcagtctagatttctcatagctgaagagtcccagacttatttctagtttcttcaaaaagatcttgaaaatacccttcaccataaaataagttgatacccatttgatgtcaagaagacactaaatccaggagttggggttttaagtgaaggttgatcaaggggcaggggactgccactcagctattcaaagccatatttcgttgcaacagtaccccagggagctaattcaattgtacctcatgcaactaaagtgcattaacgctcaacaaattgaccgcaattacatgaaaccaagtattcacttaatactaagaagcctggaataattcagcatacgcttaaaaagctgagtgtggaacccaaatgactgcttatttaatactgaaggaaggagggagagtgtggtgaacccctgagttcttcagaataaatcccttacagaatttccatagagaagttgatctatgttcctctagagaaaaggaatcacaagaagaatcaggaaacagaatacagtgaagggcaaggtgagaaatggcagcttcaggtttttcatttctaatgactttaaaaaattattcaaattcaaatcttttactgtctcacctgataagtcaggaaacaaagacatttaaaatggcaatggagctgcaggcttctggacagagaatggctcctttatccaggtaaaactacaaatgaatattttaattttgtgtttttaaaaaaatgtctgcatatttgatactgaaatatttatcactctttaaggccacctaggaaaaaaggccctcatgtccccttctgcagagggaatcaggtttggaacagccatcctgtcacattcccaagacttggaaacatacacaaaacagttcatgcttcaacatgtatgtagctatatgatgcaataagaggcgctcagtgacctgggagacaggtgggaaagtagaagggtgaagaaaagaaaagaaaaaatgaaaagaaaagaaaacttatgcccttctgattcccacaaaatggtcaatacaaacaaatccatcttaataccatatgcttctgaaggatggaaacaatacatagctgtgagtaagtttaatattattttatctactcagtccttagtgacattaccaaaggacctttctgaaatataatcttccaagtgtttaaaagaaaattccaactggactttgctagttgggtttatatccaattcaagaattcaaaacaccaaagaagaatcacagttgtgaaggtgatatgcaaataatagtgacatgaaccaagagtttgcttgaaaataaaatttaagcatgtgtcactttgggtttcgatcaaaactctaaaataaacaataaaaccatcacaaagccactgaaacacacacaatggtgaaaatgttcattcagcaggctctaactcatcgctgtaagtgcaagcaggagaagctcatgacttagatgagaaacgtgacagtggatgaaggatttaatgaatggaataaagagctctagtaattttctgaaattctaagatatgactttgtcaagataaagcagggctctgttatttcctttcttccttcttacttctcagccagcaactgtaccaccctttaaaaacatatagatcaaaacagatttgaaaatttttgagttaatgagtagtaagaaaaatgtagtgaaaaaatatagtgtgaagagttgaaaaataaaattgaggaaaacaacctgaatttttaatttgagagctgacagaatattagaatattcctacagggaataaaagtggtgttttttttttttagagttttttaaaaaactaaagattaaggaggcagcttattctcttcgaaactttggaacatctgttatgtaccaagtcctatacttattcttgacttagatgatttcggaaacacacattccccaaatcaaacacttttcatggttgtgagctcatctttagaaatgcttctgagacagtatagaacaggggtggatctgagtctggccagctttggagaatgagccttattaacagagagttattaattacaacacactggttttaacctttccaacactatgaagccacaagtacagaatgttagcgccttgatacacaacatggattctgaagtcagactcacttggctttagataatatggtatgagcaaccacgggctgttaaacctaggtaaactttttcttcatcataaggaggtggttgcagagatcaaatgagaataaatttctactggcagccacaaagaaagataatcaaaagtacagattaggtgggagtggtgacctctttttagtgtatcaaacatgaaagtttattccttatagtaaaaaacaccaacggtatggcatgcgcaaatgtcaccagatgctaggttacagaactacccttggatgtctcagtaagtctattcattcctgctgttgtatctgttatccaagaatacccaaagacaaacaggaaaaaagtggtttgatatactttcacataccactggcgggagtccaaatttttcagctctctcaataattttgaatttttcttcaatagatgaaaattcttcctataaagaaaaaaggatggaagaaaaaccatgtgattacagaaccattttgccgcttttcaatcagtaatttaataaaaatacctatcatccatcctctaccacctcactcacaaaagatttgtgatagaaacctacagaatgaactccatcctccttaagacatgcaaaggtataaaaattccatcagcatcccattactacccagtgacacagatggctctttggtgagtatgtgacttacatgcatgtgcctgtgtgactgtgtctgtttccagtgtcagctctgctgtgaatcccttttccctacctctgttcttaaaaactccactccactatcagggtccagctcaaatcctcccctttccacaaagtcttctccattgctctgtacttcccattggatttaatcattactcatgaactcctgtgtcattctatcctttatcagagttgtattaggtctatctcccacatcagacctaaggttagactgtggcttattcacctttgtagttcatttgcttcctgcatgagggcagaaacaataatggacaaagcagtaattaaaacacacacactcagccaggcgcagttgctcacgcctgtaatcccaacactttgggaggccaaggagggtaaatcatgaggtcagtagtttgagaccagcctggcgaacatggtgaaaccccgtctctactaaaaacatcaaaaaagccgggcatggtggcaggtgcctgtaatcccagctactcgggaggatgaggcaggagaattgcttgaacccaggaggcggaggttgccgtgagccgagaccatgccacagcactccagcccgggcaacagagcaagactctgtctcaaaaaacaaaaaacaaacaacaacaacaaccccccctacacacacacacacatacacacacacacacacacacacacacacaaatgtttgatatcctttaaaatatccaacatgtttggaattcaatctgcacaccagtacagcataatttcatttctagctttaatttagtagcagaaaataagctgcaaatgttaaaataaagaaaaatctcccttctcctctcttccccaatcttttcttcttccccaaccacaaactgataaaaagaacaagtacatgaaaataatgataaaataactggaggtctagcttggattgttaccttctgtcccaagaattcattcccaagtcatcaagcaataacctgcagaaataaaagggtcctcggggctccactggggagggctgcccttggctggtgactttcattgcagaatcgaagttatgactctggatatactcatcctcttgagcattttggcgcaaaatgacctcaatgatttccttctcttggtcatagttcatgccacatggggttagggaaggttcatttagatttagctgtgacggtaaaaggcattcaggacttgtatggccaatgttttcaagtaatttgtcaagaacatcatccccctcctcaacttgagaagagtctttctgaggtccaaatgtgtcacgatgccagctcgaaatcagaaatgaaggatttcttccattgggtgctaagcagccttccaaaggtccatataaaaccttaccatcccaagagtacttccctgagatatccctcacaattactctcacatcagagagagagcccactggtgatccccctaccggtccttctgtgggtgtctgaaggtaggagatgagggtgctatcattaaatacaaacagctgcaggtttggacttctgaacacctcaaaggacagctcggagccttccacatgggcattgtcatggttctcgctgacaaggctgtgcagtatggcagggcccccactgagggggtagtgccccaggtggttcaccaggtgggccatcaccattcgagcagtcaaagggatcaactccaaacttcttctcttcttctctgtaaacagcggtaaagaaacataaagagtcagtggtgaatgaagattaaaactcaacaccttttttttgggtggggggcagggggcagttccaatatggtagattacaggcttttagtgtgcctcagccacttggaaatagcaagatagtgcaaaaagatcaactctctgagctttaattcaggaaggaaaatgggaatccactggaatcgtgaaggatgttccagatctcagggaggacaatgcaggcaaacagcccttgtgatggcatccagctggtaagagtgagtgaagccccagtacccgagacagaaacagtctctctctgtaatttacccttccactggggatccaagcaacccaggccaaggcagagaatgatgtttctctcaagccccagagctatcttggggagagacttggaggtgctgagaggaaaagacaccagaaaaagctgcaggcaattcctagatctgggactgagagacaggagcacttgctctggagtggggcagggacttccacagccagaactgtggaaagcgcaccagcaggaggcactggaattgcactcttctcaactgcaggcttggggtgggaggagagagctgctacagctaaagtttctcctgggcaatgagacttgcagccagggccagcttggcaacacagaatcagtctgcatgtgtcattgctgagtgcaccaggctgctcccctgagatcatggtgcagcagggccctctctgttccattcccaggcaggactccaggcagtaagtggaaatcctttcctagactggcagcctgagctgccccaaccttcctgtgcacacatcatggtatagtagggccctctccactccatgcttaggcagatctccaggcattcagaacacctgcttgcctggatgagcagcctgagccatgctacccttcctggacatagattgtggtgcaacagggccctttccgctccgcacccaagcagatctccaggaattcaaagcacctgctcacccggactggtagtctgagctgcttcaccctttatgtagagatcctgcagcagggagcccctctctgcttcatgcttaggcaggtctccaggcactgagagctcctgcttgcctagttcagcagcctgagtctctccatccctcctctgccgagatcctggtgcaggggaaccctctccactccacatccagatggatctccaggtattcggcacacttcctcacccagattggtggcctgagctgccccacccttcctgtagagattatggtacagtggagcccattccactccatgccccagcagatctccaagaattcagagcacccactcatctgaatcagcagactgagctaacttgcccttcctgtgcagagaccatggtgaagtggggtcctctccaccccatgcccaggcatatctccaggtagctgcagtgcctgctgatctgggttaccagcctgagccaccccacctttcttgtgcagagactgtagtatagcagagccttttgcactccaagcccaggcagacttataggtacctggagcacccaaacccgctctcctgatcaggagtttaggtgcccctctgcctgtgcagagaaccaggagccaaggagatttcccagctccatgtctaggcacaccactgggcacctgatcgctgcccactggattctccctcagcactgctacttgtgcccaacaccaggggagctgtaaatgagcctgtccagtctggctcaacccattttgccccctgcccacccagggctaagcagtgagctcagaccactgtgcattccatggaccactccattgcctgaggcaatagagagcttctgctggtaaacaaggatcaagtatatacctagccaccttgcccacagccagcttttacccataaacaccatctactggcttgtaggtcaaatcgcacagccccatataaaacctgccgacagaagtgcatagggctatagaagcaaatccagaagatggcagattggaggcagtgttagcatgcgtctcccactgggaaggacagaatagtgtgtagagattcacactgtgaacttttttccaaggagcaatacaggaactcaacaggaaaactgcaagaatccacagatcctttgaaagaagcagaaagctgaagtctactccatgagacaggtaaaaaactataaatcctcagagtgtcagtcgggggagactaccttcagaatacacatccctatgagggaatctgaaaatccaggtcatgggagaaggccttaaccctacccagagctggaactgcttaagggagtgatgagaaacataaaagtagaagcagcagcaggaaatgccttgcaggcattctcagtctccagcatgaaccgagggaagccatacctgaatatatctcacaggggaccttggggaagccagtcaactagctcagaaaggggttgcagggtgaaagatgctcctaactgaatttcgtgatataatctcgagcagggataaactcctttgaccagaaccaatgggagtggggcggggggggcagggaagtgcactgcagacacatctgcctcatgggcagacaggaggggcactacccgaaagccaggtgggaaagcttatggcctgcggcagatctgggttctgcgtgcagactgcctggatctaaacctggtgctgctagtagaacactgagggagtgagaccggccttgccaactgcatgggagctgggcaaggcttactgctgcctgctactctccactcccattgtgaactcttctgtgcagcagaggcagttatactatctctggaacattaccctgaaaaccaccccctgaccctcaaaggagccatggctggccccactcaaggagagtcagagcacagacctgctcaaccctatccccacctgttggtatgtatccctgcacccaccctggtagcttaacacaaaggacataaacttgtgggagctttacagccctgctcattgcctcagaaccagattacttcccctaggcaatttagggcaagctcaaatcccacagctagtactgcagctggtgctctcttgcaagcaccacctcatggctgcaagctagctgatgcagcccactacagcatctacagatggaataacactgcccaggaaggagaaaatggctgaatgacctcagctatcaccactgcctataatactctagccaccagaggtcctgagcctgtcgaagttaaagttaactacaattaaaaccagcattcaagaaagccagcacactaagcatatctataaccaagcaatctcacagagtctacatcactcccctgccacctccatcagagctggtgctggtacccactgctgggagacttgaagaaaggtcacatcaccggatcacctgcagacatttcccagcagcaacctggagtgtggcagccccactgggtggctagacccagaagagcaatagcagtcacggtagtctggctatcaagaactcctattcctagggaaagtgggagagcaccacatcaagggaacaccccatgggacaaaagaatttggacagcaggtcttgagtcccacatctttctgccggttggaagtctcctgcagcagacacaattgcagtgctgggtgcaacagggaaagtctgcacctctaccccaacaggcaggcagcctgcatgcttgtgaagggtcgtggagaaggggtccttgttctccaccttgtccaccaccatagacacaactggaacttctcccatgcgaattcagcatgaatgtacctacagatagccctcctggaacaattcacggtggctgcatcctcacagaagcactctccaagtttaggcttgcacaagaggcagagtcacaattcctttctatatggaacatcaacatccctcatccctacagatgaaaagaggtgcctgtctgatgtgaatagctgaaacattaggacaggagtgaggctgggaggtgggtaactttcttgctggcctgacaggggaggtggattagttcccaatcttcaccctgataaaactcagtgcatctaactgagagatcccctagccacattaatcaaagctggggcctcagcccaccattgtgtattgtatctaaccacctgctttagctgcaactggtttctatctagggatacttcccctactggcctgaagcctggatcatcaagagagtaaataaaatactggggaaaaattaaacaaataaaaaagtgcctaacacggggaaatgagataagcttcaagagatccttgccattccaattccacaggagacaatgaaattgcccacaccccgagtacaaaactactacaatcagcatctgagaaagtcagcatacaaagactctctataaccaagaaactcatgtagagtcttcacccctaaaagcagcaaaatcaaattaggctataataaactataaacattaaagccacatcttgaagagggggaaaaaagaaattaaaaaaaaaaaaagtcaaatcaagaataaattcaagaacaatttgaagaaacagtctacacaaatgagaaggaaccagaaaatacaggtaatatgataaaacaaggttgaaaagatcacactagcttcctagcaatggatccaaaccaagatgaaatctttgaaataccagataaagcattcagaaggttgattattaagctactcaacgagatcccagagaaaggtgaaaaccaacataaataatttttttccccccgagatggagtcttgctctgtcaccaggctggagtgcagtggtgcgatcgtggctcattgcaacctccgtctcccgggttcaagtgattctcctgcctcagcctcctgagtagctgggactacaggcacctgccaccatgcccagctaattttttgtatttttagtagagataaggtttcaccatgttagccaggatggtctggatctcctgacctcgtgatccacctgccttggcctcccaaagtgctgggattacaggcgtcggccaccacgcccggccaccctgaccagagatagttttgttatggatgatgaagcattacactgagtgaaaaaaaataccctcaaatttgagctctttcttgcttaacctaaaatacccacgctatcacctttatttttccttttcactttctatatgatgtatccgcttggcaaggacgtgcacaccaatatgtttttaagcatcttgcctatttgcttagttaatatgtcagtgaattttaaaaactcctttgtcagagaagtttaagcaattatttttagtactttagaactatcttgggaatgtttcccaaagagtattgtacactgaaagaaaaatggtgccagaatttaaatgtatatttttaggtttttcctttttcaataacctatttatcttctgctatttttaagtgacaactcataataaatggtgaacctattttagggatagccatgttttggggatatactcatgtggatgagtataaattgatgactttaggaaaaaacaagttaattttattataagacatatgaacttacagtagggaacaacgaaatagattaagagttgtttcaattacttaataaaaataatttatcattgtgggggaaaaagtaaagcagacattgcagttgacagtggagctccagaaataaacaattaaatgattaaataaatggagaacaaatcaagaaaacaacatgaaaatgaaccatgtaccatccaccaccaacacaactcaaaacaagagtgttaagtctactccacgtcaaaactttcagagtaaataatgcattttaggaacttggtcattaaatcttaggttcaaattccacctcccttacttctgacttgtacacacccctgggaatatcccttaacctcagtttgctcatctacaaaatgcagctaaaatcaggactgctagattttaagcccttgctcatgactgtcacccccagtcctgtctttttcatcctcatctcaccttccccttcatgtcagcttgaaccttgctccagactctgtagtgctgcaagcatacccctggacctttgtcctccctcacccagccactgcctgctgtgtccttcctccttccactaagggcctcacaaaaggagtctgactcagggatctgactgtcactgcacaggtcacctgctcatgttatctggctggacccaccactctggtgaaagtgctctggcaaaacctaccaccaaacacctagttgggaaatataacagctcctgtttcattctcaccttccctaagctttctgaagcaactagcactgctgacctttctcaacttcttatttgctttcttccttgacttgctagaaatgactctttcttggtcctctttccacttccctgactttgctttcctggtgacattccctcactctgctgtccttaaggatgtttctgcccacaaggttctagtcttgggcctaggtttttaacttgtgaagtccatacaattttcatggatgatctaacacttcacacctacatctctttaatttttttttttttaagatagagtctcactctgtcgctcaagctagagtgcagtggcgctgatcacagcagccttgacctcacagactcaagtggtcctgtgctcaagtgatctgctcgccttggcctcccaaagtgacgggattacaggtgggagccatgatgcttggccttcttctaatttttagtgttgagacaactgaagattcacatgcagttgtaagcagtaatacagagagacctcaaatacctttcatctcagggtaacatcttgcatacctataggacaatatcacagtcaggaagttgacattgataataatccatctatattactcagtgttcaccagttttacatgcatgcatttgtgtgtgtgtgtgtgtttggttctatgcaattttatcatatgtatagacagtatacccacattctactcccattccaaggcccaaagctgggctcttatcattctggggagaggggtgcttaagtaagaaatacagcaggctctaagtcctgacaatccctatatgctctgaaatggactctctgctatgagcagagcaaatctaaaactgtagcaagtaaatttccatctctttttatgatgctctcctaacttggaacaatctatgagctcctttcaacacctgcccaccctgctaagtctggcttaagtccttcttcatggaaagccctcatggtgctaccagtccacagtgagtccttctggacttcactgtgtgttttccattagatgtaaagctccttgaggatagaaaatgagccttttttgtgagttccatggatttgagacatacctgtcttcaataatacaaaaaccatttgaactactaaaatgggaaaacagaggagaaaaaaagaagaaacaaggaaggcagaatttgccatcacagaggactccaggaactaggatttcaacttcaacaactagattaaaaaaaaatagagcaagcatggctaaaggctaaatccttccttttccttcccacaagatttcatacctgaaagaatactcaccctcttcaacagtcagcaggttacccaattctgctgatgaatgatactggactggctcagagctcttcacatttgccagtggcaggaaggggtcataatccgtggatgacaagtcagccagggtcagtatgtagtgactctgttgggtgtacgtgcttgagccacacacacagcagtgcaaaacctgtgaaaacagaggccatgtgcaccacggatgctactcaccgcgtgtcccctgacaatctgtcaaactactgcagcacttggcagctaggactcctgcttggtcctagctggaaatggaatgaccactcttaaatatcttcttgctattagcaaatttattttgctcctttcatatcaatgccaagaaatatgttctcaaggcaaaaggaaagtaaaagttaaaaagtacttattcacattctgtgtgattgcacatacctaagtccccctcctgtccaccaaaggcggcacaggtagaaggaactaatctggggatgaagggtagtggtgggacaggccaatcacggtggagggtggaatgagcacaacaagcagagaccattagtgcacgtcataaccagtaatgagtttaaattagtataactcatgacgccataaattgtaagggctaacttaatacaatttttaaattattcttattttcacaagattagttcctgaaagttcactggttgtttacaaattgcagttgattgaagatctatctactcatttgagcctttgtacacatacaagccatgcaaacacaaatcatcttgaatatgccaaaatgcataaatgaggtaataattgtaacagatttccctttttaatcataaattcaagatcatcaactccaaacactgatttttataagaatcaaggtaatacttgagaaaataagaaaacaccattgggttaaatatatttatgtaaagtaaattcacttttagatgactagctttggtttgctgacatggcaagaggccttgtggtcaggtaccctttgtaaataagtaccaagaattacagttgtcagggcaaccacttgactatgtcctcttcctagcaaaaaatgcagtataggaaaatccttatggcagctctcttattaatttaaaaattaagctgcaatcactgagagaattaatttctagtagccaaaatgcaataaatgtaggaaatgcacattaaaaccacacgttatgtgtaaactagcacaactactttggaaaattatttggtgttcaccaataaggcagaatacatgtattccagcaacttcactcctaggtatacacccaacagaaatgcatacgtatatgtacaaaaaaaaaaaaaaaaccttgaatattcacattttattggtccaaaactctaaactatccaaatgtctatgaacggtaaaatgtataaatacattgtggtttattctatgtaatactatatatcaccaagagtgaaaaatctgcaaatattcacaacggtttgaataaatcactcaaaaataatgttgagcaaaagatgtcagacaaaagaggatatactgtatgactcttgtatagagttcaaaacaggcaaaactactctgctctgttacacaggatagcggctatccctggacatgggtatgggaccagtggctatggggaggcacagagaaggcttccaggatgccaggaatgttctgtttcctgatctggactctgattttacaagcatgctcacttggtaaaaattcaccaggctttcacttacagactgatgcagttttctggaagcatattatacttcaataaaaagtttacttttaaaatacaaaacaaacagttatttagtaaatttatgaatttttactatgaggtgacttttacagtggtaaagcaattttaagagaaatctttaagaaaagaaagaactcagaaaagagatttacaaaagtgattgtggctaatgccgttggcccaaaccaagctctgtacaggtttataaaccacaaaaacaacagaagtatctaatgaatcctaatatagttattaaaatctttgactactgaagaaaccatttaagaatacacaaatactttttagtagaatttcaaccacaattaggtgttttttttttaaagtaatacttttaaaaataaggcaacaaagtaatcagtctgtgacttggactcttttttattattaaaggtttcttactaaaagaataaaccacagaattttccctccatagcagtaattattcagtggacatgcaaatgctaaacaaacaaccaaggtttgagagacactgttaagacaaattacagaaggatattataagcaatccagagcaaatgccacacctagtcatcagtgtgtatgtgtgtagagggaagggatggggggttaactaagaatattttaaatgttataaaaatgatgacgctaattactttgatgtgacatagttccttaatttatttcttaagatttttttgaggcaaaacgattattaagaccattaaacctttttcttcctttgataaacagattttgtcaaactaatgctgtatacaaatagataaaagaaataagacctggtgttctatagattagtagggtggctgtagttaacattaatcaactgtagatttcaaaatagctagaagagaataattccagtgtccctagcataaagaaaagataaacatttaagacagacaacccaattaccctgatttgattacgtgaatgtattaaattatcaaatgtaccctgaaaatatgtacatctaatatgtatcaacaaaaataaattaatcttttaaaaagaagctacttgccctagggaaaaaattaatgtagatatccctataatatgaacagttctttaagtagacatagaacatgttccatgaaaattgaagaattctgacaaaactgcagttgtttaaagattaaagatgatagtcatgtaaaatgcatgcatctttaacttggtaactaaccactgcttctttacatctgttctgctttcagtccttaagttatttacttttttggggggggatggagtctcgctctgttgcccaggttggagtgcagtggcgagatctcggctcactgcaaactctgcctcccaggttcacgccattctcctgcctcagcctccggggtagctgggcctacaggcacccgccaccacgcccggctaattttttgtacttttagtagagatggggtttcaccatgttagccaggatggtctcaatctcctgaccttgtgatctgcccgcctcggcctcccaaagtgctgggattacaggagtgagctaccgtgcccagccaagttatttactttttaagaaaacgtttaagccaccataaatccttttcaaaagggcaatgacaaataagtacatgcataagacatattttggtggttctctgtcatataaacccacactccattcccccaggcccaggtgtagactcaccctgtagatataatccagcaagggggctctggccgaatgctgctcctctaggactgctgtggacacggggtggagaaggacactcacgggcaatgccatgcaccagtccaagaggcagagtagcaaggacacaataaactggaagaagaacatgcccggtagcttatgctgcagtctcttaaacctcactacatgtaataataagagaattatccctacacccagtattcagtggacatgcaggtgctagataagtaggtaagtaaataaataaataaataagtagcattttcacaaaaaagactgttaaggccaatagagaaggatattacaaaggatatcactagttgtaacattatttatcattttaccttacattaaaataaaaaaactataggaaaaacttagttaatgtgccacctaccttcttgtctgtttccactgaggagtactctgcacttggtaaaagaaaagcaactgtggccacgaggatctgcataaaagataaatccccaatcaaacagaccatatttgtaagcctttgtaagcctatgttaggagtcccacgatggccttgcaactaaacccagcttggtgccaactcaccacagaaaggtgataaaaagcagagggccagctgtgtggtgatcttgaaaattagggaaagacaatggggccacatccagtttccactctacttttctggttgaaaaattaggagggaaggcagagaaaagagtatttctctctgcagtcacataattctgaacattggtttccacagttttcatagtgaagtaaaaaaatacttctaaaaataattatgaaaatgctcccattttagttttattgtaaattaccctacatctccacctgctatcctggtgtaaacagcaccccttttattctcaaaagcagtcccatttagatgataaattacatcatcaccccaaaaccctactttccatttcagagcactttatgttcccatgtccaaactccatttcactctaggtcacttaaggtcaaaaatcacttgtgccttttaacgtgtctctgagagaacaaagtgttctttccagtgaaatctgtctagggctgagagaaaataaatgaatatcacttctctctccttgtaatacctcatggggacaaatgaagtttcctcgaagagttaccactggatgtataagaacagggcatgtttttaaagtgcagctacaaaaatcagtagaagtgccttatcccatggacacctacgggagtgaagctgcctgcttgtgtacaggcaaagcacacttggatgcaagtggccttcaggatatgactgtggagaagattcttcctattccttccgcccctctttcctaccagttacccccacaaaggttatcgtggtagcaatctcattacagccggtaatcatgctagggcagaaagtgtggtccagggctttagtctgggagagacttctgttttacacaacagctgcccccctccacccctcacggagggcatcataaccagctgcctactccttgttggcaccatccaaattgctcttgatgaatgaagcccaatctacaaaaggtctctttgttgtggtcgtgcctgcctttcaaactccccaagtataagcctctgtctggaatactgctggcttctttacatagtgcctgaaatcacagctgagaagaaccagtctaacttaatcttaaaacgagtgacttgtggcaatttaatagttggttctctaacaattatttgaatatctataattaattaaatatcaaatacagtaaaaaggaaatgcttatgttttagtattacagaaaaaaagacttacttctgccattttccgaggcagagaggtttcaaacatctgaagcttctcccagtaggaaaccagcaactgaaggacatcgcaagctacctgggccacgattttgttgggaaactataaaaggaaaccgaatcccaaagcagacacataacttaacaggtgtatcgttcttaaggacaaaatagttatttcttctcagttccttatagattacatttatctgttttgcctcaaattgatgaaaaatatgtcctattaccacagagtttagacatcgtcacatcaccattttaaaactgtctcttctctagcctcactgtgttaatttacataacgttctacaggaacaaggagctttcatttactcatttggaaattaaaaccataattcaaatttcttattcagctcacataaatcatatttttgacaactagagaaaattaaaatgtacccccatacactgaaccttttacaaggattttactcattctctcactgataaatcttcactgacagctctgcaaggtagatgttattttcattttacacatggagaaacagggattgatcaaatggctttctatcctatgaaataaaacttgacctacatgtataacatactaagaatgtgtaaaattagagtgtaggagaagataactaatgaattatggtatactcaattattttgagtatgtttcctgaggctggcgtgcatctcaagtcaccaacaagggctggatgcttccattgattgcgaggcagcatgtctaagggcagcaccttcaaggtcttactttttcatgctgggagagcacagaagggacaagggcaccctctgcttccctccctggccagaacatggggctacaccattatccatatctcattatctatagcaggaaaggttcgtcgctgaccctagtctagggacacctcactctaagccacatgaagcagaccatcatcaacttttagtgccccagtgacaaatgtacagaataaggaagaagataagggaaaggtttttaattctacagaataaacagttactgactacccctacctgagaggcactagctaaacccagggttgtagtcgttgcactcaggggctcttcacagccttctctggccacagagacctcacatcccagatgacccaatttccactgaccttgttccatctctcaaacactctggcttgcttctgccccatggcctttgcacctgctccttcccaactttgcttggaacacttaatccccaggtctgcatgtggcttgcattgttatacctttcaaattgtggcacaaaatgtcatctcctccctgaggccaccacaccgccctccccccacacccccaagagctgggtggtggcccaccccctcagctcttcagcttcatcctattcccctattagatctccttcacagcattacaggctatcagcgctgacctttttgtttgttattttcctgcatatattgttcaccactgtatctttaatgcctagcatggcccccttaaggatgtgcgtggtgtgcctaaggtgaagatgaaactctgagagagtgggagaacatgagtgggcactgtgtgtgttgctgatgcaccacagtggcagagtcaccaggtggaaagataaggctggcaaagctctgaactcaagaagctggaaacagacaagggaaaattacgagagcccacagacaagacacaaaagctatgggcagacaggagtgggacatgaggcttgggggaaaacaggcagagagaaggcatcgtggagggagaggagagctaagctgtgcctggagaatgcaggggggatgtggggtctccttccaggtatgggtggcaaggcccaggcaccaaggtaggaaaggtcggtcggatacagggggctgcaggcagggtggtgttactgacatgtaatgaaggaggtggggaatggtggagatgaaataagccattcatttgctctctcacttctccagcatatagtcatagaacaccaacagagtgccatgctgagcgctccagcctgtgggctgcacaggtcagcctgtgcatggacagatccctctgacggtggtatgaacagtaatctgtgggggccagtctaggactggtgactctgatcaggaggctgagtattggcagggtgagtgtgtgagggatggacttgggcagtgggtgggacggacgatgggtattcaatgggcattcaggaagtacagctggcaggactcaaagccagaaacagtggggtaaggagaaggaggaaagtcagtcatgtctcagaagacgaggtgggagaaggagcagggctgggcagttcacaagagttggtgagtatggctgtggcttagaaccacctcccccaaccaccccatgcctgccatccatctgctaccccaccataaacaaaccagccaaccaacaccttgctgagtggaatgctctgcacattcatgggtgcacctaggtcacccttgcagggcatttctgaagggttcttacaagaggggtggtgctggctttatgtggagcccgtaaagcaggaagccctgccagagcttgcactctccgctacccatgaagcaggctgaggctgggctgggggtggggccaaggcccccactgcctcctctttctccatctctccctcctggcagagccccaaagcctcctagagtcccctgttctcatagtggtggttgttctcctcgttccttgtagcaactctttccctcccagtcctcatttcttcgatttatgtgctatgtccttaggtaaaacaacccagttgccacagcaacacggaaactagagggaggcaggagaggagggcagtggggagggaggtgtcctcagagaccaggacttaagtcaatgagtttcctgttattaataatggttaaagacagaacaacttggctgcatcctgatccctctgctttcttagcaattcaagctggagtcagttctttgaccttcctcagtcctcttctcttttgctgctatccagaggggggaggattcaacaggacaatctccatgctgtgctgggatagcggacagagtgagagctcaatatgtggtaactgcattgtttttctggtgtcttatattttcccccataattatagaaaagttgcagaaagaatatctatccctctactctgttatcaatttccatctctttcctatactatatagaaatatatatacagtcatgtacctcctaaatatgttttggaaacatttggtaagcaccacatatacaacactagtcccataagcttatagtgccatatttttactgtacctcttctatgtctagacatgtttactcaagtacttaccattgtgttccaattgaatattcagttcctacagtatttagtacagtagtgtgctgtataggtttataacctcagagcaacaggccatcccacacagtccagaaaccatctaggtttctgtaatattctttatgatgttcacacaacaatgcaatcacctagcgacactcttcttagaatgtatccccatcactatgcgatgcgtgactctgtgtgtctgtgtgtgtctatctccttcaatctaacacaccgagttattcatagtttttccatggaaggagtagagatgggggaaccaccttacattaactatatacatctagatttaagaaaaaataaaaattcaaaaacagatcttggaattgaaaaagggtatttaaaaatgaattggaatctacattgatctataatttatagccaacttgttttcactttaataaattatatgtaaatatttctccatggctttgggagtcaggaggtatcccacacacctcagttgtgtaaaactccacacatgtggccagagtgttctgggtttggctttggcaagctccttcagttcctagtcagttcatctacctcatctgtgaagtggaggtggcactgacatttcccctcacagggcagctctgcggattaaacttgcctacaaaggtcagggctcagcaccctgctgtggctggagggacactcttctgtgatattttggttggataatttttccattcctcatcacagggatcagcagcaagtgtttttccagctcccataatacaaccaccacccccacctccactaggtgttgtggaggagaaataggggaggatgaggcaatgggggtggtcagagggtgtacttggggaacaggaggcattgagtttggtcaagcaggggccagacgccaaatcaaggatgggagacagcactggctggtcatcctatgggcagaagcagataatgcacaaagggtggtacagagactgttgctggcctgatggcgacagtcccaggcgtcagctgtaagtgccgttgctattatagctgcatgtggcagggggcacagaagggcatgcagcagcctgaatgctggtgttaggtggatggttcaggggttgaactttggctcagtgaggtggtcattctagagccttgaacaagttccttaatgatcctgcacctcagttcctccaccagtaaactgaggacgcttacccctgaactaagaacttccacaaaaccctcagcacagcgcctggcagagaccaggcactcactggttccctaagtgtgataatggcaatgctatttattaccaccatttccaagcaggacctaggaaaggatccagcaggatttgagctctggcttagaggcagcctaacagcacctgtgaaagttcaagcatgtctttaacaccacacagatctgcttttattgctggttccatcacttatacctgtgtggcctcgggcttgtgacctaatttctctgggccttgatttcctctggtataaaacagaaattgcaacatctatcttgcagagctgtcttgaagattaacagaattatttagagttcgccattactctgacctagtgtgagtgcccagtgaatggcagttcttcttctcattaacaaaacaaagaaacaaagatgtccttaaagtgcccaagattcagccagatggtgaacactgagaggcctaactggaaggtgtggaggcctctcccaggcctgctgaagaggccagagcacgacaccccactctcttgtcacccccaccaacaggtgacaggtgacctctttgcgacaggagcttcccagccaccagaggaacccatttggccactggtccaggaagactcgagacactcgtggccaggctgcagctgccagcaggggagcatccgttggtgcccctcccgggagcctcacagcacatgcaatgggaatcacaatccctctgtcatttgggggataaaaaagatggggctaattcaaactcaaactgttaaatgcctcagatatggcttaatatccaatcagcaccacaaactggtaataccttcagagttactcctatcacattgatggcctctttcacctgagggtggcttgtacactgtgcaagctcttcacatatccagaccccaagggagcaaacagcaatgcatctttttaaaaagaagaaaacagaggaaaactctcatgaaacttaatatactttctcagtattttcaaataacaaaacactttaaatctatttatacaaaatagcaaatattatagatctattagcagaatgttttcttgaaagaaaagataaagaaccctcaataggccaattttcaggacaaatagaaatattgataatggtttagtacttaaatatttaattaaacaaatggcatattttctattaattgtcacagcccatatatatcacttagttttgttgaaactaataggttattacatttgactgtttcaagatatttttgaggaagaataagaaacataaatctgagaaaactgtcaaaaattgtgtttgtaattgttttctttaccataatatgcacaatacctataccacaaacataaaacaaatgctatattttattttaaagtatatttaaatacaactttcaaaataaatttcactgttaattcttctcaacagtgtgctaggaccagatattcttcacagaaagccgaccatgccatatacatttctattctgtttttaactacacagaaatttggctttctacactaaagaaagagagaggaagaagaattgccaagacttgatggtttagatgcagtaggtgtaggaaaaagaagaaatcaagggttttctctaaatttctgaactgaaaacctgggggaatggtggggccatgtggtgagatgaaatctgaggaacagtcagctcggggggtcagaaggagactcaagggctcagttatggttgtgttaaaacattcaagttgagatgtcaagtaggccgtttaatatataagtctgaatataaaaggggttcactgaagaggcaggtaaataaatgagcaagaagatggtatttaaaggctgatcagaataagagtgcccaggaagtcatagagagaataggcccagccctaagccctgcgtcactctaacattcatcagagattaggtagaggaggagaggtcagcaaaagggacagaaaggagaaagttcagtgaggcaggagcaaaattagggaattatgttctgaggaacatgcactattcaggaaaagagtaacgagagactagctgcaggcttggtaagtatgcatgttcaaatacctagtagaacctctaaaagaaggaaagggagcctatgatttaaaaacaactgagataataaatagaatggaaaaaaaatccaaaaaaaaaagaagaaagaaagaaagaaaaatgggatggggaaatgaaggcaagataaaggagaaataaaagaaatattataccttatttttaataggatctttctttcctattaaaaataaagtataacatatgataagagaagtacatccaaacagatcagtaattataacaaacgaaaatgaatctaaagcttcagttaaaaaataaaggtgggatgggataaaattacaaaatctggatatatacagtttttgcatagacatctaaaagaagactataaaaaggttaattaaaaagaatagaaagtattatttaactaaaccagtggtctttaagataaaaaaaaatcctccttagaaataaagagtcactacaaacatgtaaaatatttgattcactatataggacaattctaaacttttacgcaactaatcacatagcctcaaaatatataaagcaaaatttgacagtatataaggagaaatacataaacacaccataatagcaggagattttaacatttttcttccagaaggtgatcaagctgatgaaaaaaatcagacaggatacagaatatttgaagcccagtagtaaaaaaatttaataaacacaattagaagactatgcccaacaaagaactgggcattcatttttttcaggtttatatgggatactgacaaaaactgactacctagtgggtcattaagcaaatttcaacaatttcaaagactgctgtaagacattttgatccacaatgcaattaagtaagacatcagtaaaaaaagatacctatagaattcagacaaagtagtaactagcaataaaaatatagtcttaaatgtttatatctgtgcaggagaaattaatatactaaatatataaccttaaaggtaagattgtaaagaaagtaaaaggaaggatagaaaagagcagacagtggcaaataaaagcaaatataaaatagagaagttgaacaaagacaaaagcctagtctttgaaaagactaataaaattgacaaatttttggcaagactaattaaaaaatcagaggatacacaaaacgtgtcagagattaaaaagtggatgtaaccatagaagtgaaagagataaaagataatagagatggctgggcgcagtagctcatgcctgtaatcccagcactttgggaggctgaggcaggcagatcacgaagtcaggagattgagaccatcctggctaacacggtgaaatcccgtctctactaaaaatacaaaaaaattagccgggcatggtggcaggcgcctgtagtcccagctactcgggaggctgaggcaggagaatggcgtgaacccgggaggtggagtttgcagtgagccgagattgtgccactgcactccagcctgggcgatagagcaagaccccatctcaaaaaaaaaaaaagataatagagataactcatagctcatataccagtatattttaaaatttaggtgaaacaggcaaattcctagaaaagtttggtttatcagtactgtcaaaaaaaaaaaagtagaagaagaagaaaaccttaatagtcctaaaatcactgaagagaatgagtcagtggttaatcttctcatcaagaaaatattagacctaggtagttttaccatcaaggtctactaaatactcaagaatattaactctaattttgtaaaaactctttctgattaaagaaaatgaaatagtacttattttgtgagactttataaaattataatcaaacctgataagggaaggatggggaaggaaaattataggccatcaatataaaagcaactttcctgaacaaagtattagccaaaccaagtctggtatcacataaaccaagttgaggttatccaaaaacgcaatgttagcttaatatttgcaaattattatcagtttagcttctggtaaaagcagactaggaaatttgaactaacccatctactgaagataaccaaagaaattagacaaaatacaagagaaaaaacacttaaaatcatcaaatagctggtaaggcagtgatgaatgatgggctgctgtcttggaatgaggctacagagggagcagaacatgaaccgttcctaggagggagtaagaggctgagctgggcttctggtgatcttatggggtttgaaattgaggatcagagacaggtgttcccctccattagcattcccagctttggtcttcacgttgggaggagaggcagaaacttttcaatacgtaagtggcccagaaaacctcatatatcttgatcataggttgctagcaacctcagatgcctggcagaagcagccagaatatttccagacactgccaaatgtctcctggtgtaaaagatcatcactggttgagagtcactaccctacacatacaccatttctataaatatttggtttatattttcattttctttcttcttgaaaatatcagaggatacatgattatatttgtaatcttgctttttctcacacaaaatagtgtactatatactcttctgcactttacaatttttacttaataatgacatctttttaaataatcatgcaaagcatcttcctggcatcattcttcctagacttttcagtctgtataagagctatgtgaaagaataagtgttttcttttgtaacattaactacttacacataaatgtgtatcttaaaattctaaaatagtttacctcttattcaacatttaccttgcatattcatttggttcttctgtggcattcttcagtaaaatatttatgaggtaatgctaaaaacacaaaattaagtaaaataaaaactttgtgtcatagttggtttcccacatgttctgaccatgttccaggcagccaggagctactgaagttcgaccagggagctcagagagctcatctatgagtgagagcctggggggaagaagaacactgggctcgggggagcgggtggtagaagatgggggtctccacagggcctccttaggccattcagcccgcgggagtagagcgcttctggtataaagcaaatcagacttccagataggaaaatctcggttttcttttacttcaattgaattatatgttgtacactgaattatatactgtaattatgttttatagtttgattgattctgggattctaaaagcatttttgtttacctcaaagtcagctgaggagagaacaaatgcttacttttattctccaataaataatttagaatctcaaagtattagcagtatttaatcaggccaacaaggggattgaatatttagcttatttccattatttcttataaattaacttgatgcactaatgcagttagttaagctaataaaattattacaaagggcaattcactacatgattatgatccttaggtccaataaacaggtataataaaaaacacctgctatagctacagctataaggtctaactgcaatatactctgaatttaacacatgcatagcccatgaatagtcttctagaaacaactactgaaacatttaaaagatacagcaaaacttcaggaataagcagattaatatacactaatggaagagataatcatacatctagaattataaaaagtactaaacttgagatacagtcaaatgcgttatgtaccttgacatcttcagttcctgtaatggcctcatttacttctggcactgactgcagtaaaggaatctcctggtaggtatttggaaagcagaccagagagccgaggacagtgacagcctctgaacgaggcgcctgcacataaggaagaggagcacacacatttctctttttgtaagttagaaacgttaaataagtgacatgttttactcttcatcctagataaaaaataccaaacttggccgagttattctcttccaagtgcatatttaagcaaaagaggtttgcctaaatgaaaaagcaaatttctaagtaatggaaaatatcactgtacttggatgtaaacaagtgttgtggaaactgatctgcagattcattcagaattagaaaggccaatgactctgtcatgactgtttacattgttttactgctaatgttctcaacaaagcagggtaaaggatatcaactgaataccattttgctgttaagaacaattaaggaaaattcatagggaagtagagatggaggtaactatcggagagtagaaagagaagacaaactatcaaatttcccatctactgccaagaactgctttacgaaaaaatataatgagatactatatcactatatctagtgagatacttttatttgcccagtgttaggattaggtatatattttaaaaggcatggctgggtgcggtggctcacacctgtaatcccagcactttgggaggctgaggcgggtggatcacctgaagtcaggagttcgagaccagcctggccaacatggtgaaacctcttttctactaagcatataaaaattagccaggcatggtggtgggcacctgtaatcccagctactcaggaggctgaggcaggagcattgcttgaacccaggagatggaggttgcaggtagccaacacagtgccactgcactccagcctaggcaacagagtgagactccatctcaaaaaaaaaaaaaaaaaaaaaggcatttcactagatttcaactcagccaacactagcagatatggttagccaagaataggggactacacaggtctgtcatcaatctactcacctatctgtccatctatatgtctactattatgtaataaaacaatgaaagctcacatttaaggagttctcactctgtgctaggcactcttctaagtgctgtacaagcatttcttcataaagtcccctcaccaacccaatgaagaagaggctactgttttcattttccagtgagaaaactgacgccaaagaagttaagcagcttttcagtgtcatatggctcctaagtgatgcaccctggatttgaactgaggccatctagctccaggtccagactgagcctacagttaagcacttgggctataaaatcaaagagagcttttctccctcagagagatgaggcgcagtatgtgaggtaggtgaggagaggcaaataacagctacacacaattcagtgaagcacctgctaggagagcaacatactgaggatagcatgggagcccagtccttcatttttttacctagcttggttcccataagtacacaggtaaataaaaggcaatataaagcacagcagagctattccatgggatgaggcaaggattggttctgctcaggatgtttaggaaacctaaaacaaactactgctaagggccacagaggagagtagaaatcaggcaggctggcggtgggtgagggagccagttgagtagggaagaggaaggtgtccatgagatgggaggctgaaagggtcagaagcagtcgttcccaaagtatgttccactagggccacagggactgtgaaagggcaaaatcaaagactcccgggaaaaagacgttgcagagacatttggctaagcacaattaaacaaaagcctttaacatgttattgtacactgtgaatttccaagtgaagaagtgtatttcccaaaattatttgactatgaacctggctttcttccttccctttcccccaaagtatctggggagattactgttctgaagaagactttttgaaatgcttgtcctgaggttaggagagaaaagtctgggataacaattcacatgtgttcagaggaactgaatgcatgcgtctttgtggagtgcagagagagagaagtgatgacagaggtaggagccctgaggacgaagagacagacaacaggaagaatatcattaccaacccacagaagtcctctttgtgcccctcccatgatagcctcccctcctgcaaagtaaccgtattctgctgtaacaccacagattggttttgtctggtttttcaattaaataaatgaaattagagtatatgttcttttgtgtctgacttctttcactcattatgttatgtaaccgatcctgtgttttcattgtatataataatccatcttatgtacacactataatttaactgttctactgctgatgggcatttggattggctctaggctttggctgttacaaataatgttgctgtgcacaagcttctcctcatctcttggtgacttgtgcgagccatctgtgcatcttcctcccccactgcctcagtggggcagtcctacctagcaggggtacttcaaactggtaattaccttgtgctaactgaaaattctgactgagcaggtgtgctccagcccaaacacctttcaccagttcctctacaattttaacctcaagtttaaacaagaaagtactatcattcagagtgtgattccttcatgtaactcttacacattctcattcatattctctctctttttaaaaaaacattttggaaggctactttattaattttgtgttgattcttttttcaactttactaaagcataattaataaaaatttgtatatttaaagtatatacaacatgttttgatacacaaatacattataaaatgattaccacaaacaagtgaattaatatatcacctcatatagttcctttatgcgtgagttgtgaacacttgagatctactctcttagcaaatttcaagtttataatatagtattattaattatagtgaccatgctgacatctcccgaactcattcattcggcataactgaaacttttgatccactgacaaacatcatcccatctccccctaccccaaccacagcccctgggaaccaccattctacaatctgcttctaggagttggacttttttagattccacatataagtgacaccacacagtatttatctttctgagcttggcttctttcatttggaaaaatggttcattcatgttgttgcaaatgacagaatttccttcattttttaaaggctgaataacactccactggagatatgtaccacatttcctttatccattcatctgtcaatagacatttaagttgctttcatatcctggctattgtgaatgctgctgcactgaacatgggagtgcagatatttcttcaacatactgatttcagttcctttggatatatacccagaagtgggattgctgggtcatatggtagttctatttttaactttttgagaaacctccatactgttttccataatggctgcagcaatttaccttcccaccaaaagtgtagtacacggggatgaagatgtgtaggaaaaatggtatgactagcacacccagtacccaaccattcactaacccacacactcatgtgcaatatttgaaaacagaattaaaaatcgattcatggctgtaacatttattcctactatcatacctcaggcagatagttaaatgtatataacattacataacattgatatatgtgctaaagaccaagcaaattcgataccgtcagaaagcttaaaagataaggcactcatgtctcttttactgtagtttcaaagaacataacacttttttctttattgcaagctggttttgtatttcatcctttctgaattttttgaagtttatatttcaatacttccttccctccacattttctagtttgtgtttttccaggttctggttatgctttcattatttattttcccatcttggcaacacttcatgtgaatttgacctttacatttacctttataccatctttgatttgagtagtctctattgtgttgattctttttttccagctttactaaagtataattaataaaaatttatatatttaaagtatatacaacataatgttttgatatacatactgttttaatatacatattgatccttatcaatatgtttttaacctatgtctttggggatgtgttggttgtgatgtcaaatctcattctagttttttctgtcagaggcctcaaataaggaagaatcactattttggtaattggtgatcacagagggaatggaataataaatgggcattatatatcgcaatctaggcaatatataatgaattcaaataaaagtcaggagaattttttttttttttttttacgtatacaagagttctctttcctccacatccttgcctacacgtatcttttgtctttttggtgaaagccatcctaacaggtgtgaggtaattatctcactgtgatcttaatttgcatttccctggtgatcctgagcatttttcatacatagcagttccctcttatttaaaggggatacattccaagaccccctcagtggatgactgaaactgtggatagtaccaaaccctatatacactatggtttttgcaatacatacatacctatgaaaaaattttaatttataaattaggcagagtaagagattagcaataactgctaataatgaaatagaacaattataacaatatgacattcttgtgctttggggctattatgtaaaataaagattacctgaacacaagcactgtgatatcacaacagtccacctaataacagatatggccactaagtgactaatggctgggtagcagataccacgtggatccactggacaaagcaatgatccatgtcccgggcaggatgggccaggacagctcaaggtttcatcatgctactcagaatggggtgcaatgtaaagctctgatttctagaatcttccatttaatatttttggaccaccactgactgtggtaactgatatcagaaagtgaaactgaggataaagtggggctactgtactattagccaactgtatatctgtaaggctactttaatagcccacctagccacactgacagaaaatgaccaccatgtgtgatattatctctaggaagggctccaacatttttacaggaaactctcttggtaaataatgaacatagtattggaagttctggccagggcaatcgggcaagataaagaaataaagggtattcaaataggaagtcaaattatctgtttgcagatgacatgattgtatatttagaaaacctgatcttatcagcccaaaaactctttaagctggtaagacacttcagcaaagtctcaggatacaaaatcaatgtgcaaaaatcacaagcattcctatacaccaataatagacaagcagggagccaaatcgtgagtgaactcccattcacaactgctacgaagagaataaaatacctagggatacaacttacaagggatgtgaaggacctcttcaagggtaactacaaaccactgctcaaggaaataagagaggacacaaacaaatggaaaaacattccatgctcatggataggaagaatcaatatcatgaaaatggccatactgcccaaagtaatttatagattcaatgctattcccgtcaagctaccattgactttcctcacagaattagaaaagactactttaaatttcatatggaaccaaaaaagagcccatatagccaagacaatcctaagcaaaaagaacaaagctggaggcatcacgatacctgacttcaaactctactacaaggatatagtaaccaaaacagcatggtactggtaccaaaacagacacatagaccaatggaacaaaacagaggcctcagaaataacatcacacatcaacaaccatctgatctttgacaaatctgacaaaaacaagcaatggggaaaggattccctatttagtaaatggtgatgtgaaaactggctagccatatgcagaaaactgaaactggaccccttctttacaccttatacaaaaattaactcaagacatattaaagatttaaacataagacctaaaaccataaaaaccctagaaaaaaacctaggcaacaccattcaggacataggcatgggcaaaaacttcatgacctaaacaccaaaagcaatggcaacaaaagccaaaattgacaaatgggatctaattaaactaaagagtttctgcacaccaaaagaaactatcattggagtgaacaggcaacctacagaaagggagaaaaattttgcaatctaaccatcaaagggctaatatccagaatctacaaggaacttaaaccattttttttttttagacggagtcatgctctgtcacccaggctagagtgcagtggtgcgatcttgacttgctgcaatctccgcctcccaggttcaagcgattctcctgcctcagcctcctgagtagctgggactacaggcatgtgccaccacacccagctagtttttttttatttttattagaggcggggtttcactgtgctaaccaggatggtctcgatctcttgacctgatgatctgtctgccccggcctcctaaagtgtcgggattacaggcgtgagctaccaagcccggcaggaacttaaacaaatttataagaaaaaaccactgggtatatacccaaaggattataaatcatgctgctataaagacacatgcacacgtgtgtttatagcggcactattcacaatagcaaagacttggaaccaacccaaatgcctatcaatgacagactggattaagaaaatgtggcacatatacaccatggaatactatgcagccataaaaaaggatgagttcatgtcctttgtaggaacatggatgaagctggaaaccatcattctcagcaaactatcgcaaggacaaaaaaccaaacactgcatgttctcactcataggtgagaactgaacaatgagaacacttggacacaggaaggggaacatcacacaccacggcctgtcgtggggcggggggagcggggagggatagcattaggagatatatctaatgtaaatgacgagttaatgggtgcagcacaccaacatgacacatgtatacatatgtaacaaacctgcacattatgcacatgtaccctagaacttaaagtataataataaaaataaaataaaattaaaaataaattaaaaaataaaactgtatatggtaaaaaaaagaaaaaacaaacaaacaaacaaccccatatgaaagtgggtgaaggttataaacagatacttctcaaaagaagacttatgtggccaacaaacatatgaaaaaaagctcatcatcactggtcattagagaaatgcaaatcaaaaccacaatgagataccacctcacaccagttagaatcattaaaaagtcaggaaacaataggccgggcacggtggctcacacctgtaatcccagcactttgggaggcccaggcaagaggatcacgagatcaggagattgagaccatcctggctaacacggtgaaactccatctctactaaaaacataaaaaaaatagctgggcatggtggcgggtgcctgtagtcccagctactgggtgacagagcaagactctgtctcaaaaaaaaaaaaaaaagtcaggaaacaacagatgctggagaggatgtggagaaataggaatgcttttacactgttggtgggagtgtaaattagttcaaccgttgtggaagacagggtggcgattcctcaaggatctagaactagaaataccatttgacccagcaatcccattcattactgggaatatacccaaaggattataaatcatgctgctataaagacacatgcacatgtatgtttattgcagcactatttaccatagcaaagacttggaaccaacccaaatgcccatcaataatagactagataaagaaaatgtggcatatatataccatggaatactgtgcagccacaaaaaagagtaagttcgtgtcctttgcagggatatggatgaagctggaaaccatcattctcagcagactaacacagaaacagaaaaccaaacactgcatattctcactcataagtgggagctgaacaatgagaacatatggacacagcgaggggaatatcacatactggggcctgtcagggggtggggggcaaggggagggatagcattaggagaaatacctaatgtaggtgacaggttgatgggtgcagcaaaccaccatggcacatgtatacctatgtaacaaacttgcacgttctacacatgtatcccagaacttaagtataatttaaaaaaatgagtatttcaataaagaagtatgatttcccttcttgtatcttgtaatttttttgaaagatgatgtgaatggttaaaatacatttgaaaattctttgagattatcctaaattttttcagaaataatgaagtatgaaaagttgtcataattatttacgataaagccacagttgaacaaattcaacatttttcttcttctacttttttttttctttttaagagatggggtcttgttatgctgcccaggctgaactcaaactcctgatctcaagtgattctcccaccttggcttcctgagtctcctatagctgtgactatacatacgccaccatgcctggcctcttcttctcttttacctttcttctcttttgctcctgtctcttttcacttctctttgttttctaatttatctttataagaaaaagttagtgtgtgaaagcgccaacatgaaataccagctacaggaagtattttaaacaatttaatttaaaaccaagggcttgaagtttgaatttaccctgcaaagaagaaataagtgaaaaagtaatctcatatcaaacaagatttaggttgttggatggcaacactgatttcgacaccaatgcttagcaaatagtaaagctaattttatttataccatttgaaggggcaaagataactctgaatatataacagcttatagagcacaaatggaaaaggccctttaactttaaatgtataacagtattctctcaaaaaggcattaagatattgctttggccatgtgcagtggctcacacctgtaatcctaacattttggaggctgaggcaggaggatcatttaaggctaggagtttgagaccaatctgggcaacatggagggactccaatctctacaaaaaatttaaaaatcagccaggcataatggcgtgtacctgcagtcctaactactcaggaggctgaggtgggaggatcacttgagctcaggagtttgaggttacagtgagctaggcatgacagcaccagtgcgcttcagcctgggcagagaatgaatgggaccctatctcttgaaaaacaacaacaaaaaaagaaaagaaaagatactgccttagtagtagaggtaaatgtagagagtaaaaataatttttttgtagcccttactgatcatttagtccacttctaattttttattacaaaaattctgccaaagtattctggcatgttattaagagaatacatatttacttctagttaagactttactgttctaacattttaagaaaatattttctatgagacttataataaccaagacttaatttaaaaacaaaaaaaaacttactgctaatgtacattttaaaactctctattttagacatttatgtctgtgtcaccatttactggaaaatgctaataatattctaagagacaagtcctgcttctgactgtgtaaatgtgctgaaatattagtgaggatatgatttctcacactttggccttttgatgaaacgcctttccaaaaccagtgtgtcatcttatcctacaatttcacacatcagctgccagggtatctaccctgagagcccagtttcacattgcactaatgagtcaacacctgttaagagtggagaaatctgaaccttgttagcgattgtgaagcctcttgggagctgggatgctgagcattgtcatactcaccgtcaaaatgtctgtgctaaggaccctggcagcggccgtgatgaagtcccccaccagcattgagaagccaggaaaacccagggagaaaaagcggggtggacagtgccttatgatcgtatttaagatatcctaaaagggaagataagaaaaaacacaatcgtaatgttcaaacacaaaattccaaagtagtgtttgtagtggtacatatgaccactgtataataatccaagagagcacagattacagaaaattttcagtgaaagggatattggaaacagagttactccaaggattactgtacccattttaaaggtaagattggagaccccaagctgtaagatgaattatccaaaatctaaatcatggctctgagactagacatttcatctgtcttccgtgtaaaggtaggctccttggacaagctacaggagtaatgaggtaaatatgtaattaaaaccttcaaatatctatcactaaaacaaatgtcctgtctttagctttcaattggccacagttaaagcacagttacattaaaatatcttaaagtaggcaaagacatggaaaatttcactcttcagatagttttacgtgttcagaaatgggaatatgcagagtgctaaggtgacgttgtaatcagtgaaatgctaaggtcagggaaacagcatggctctgagtatatgtgtgatctcagtgcaagtacaaagtgcaacagtagccttttgcacagagtgcagtgtgaagagcatcatctgccccagacatcttgtgttcctgtgtgtgtaatggcctctcattgatggctggatggcccctcaccccccagctctggtctgaagcagatatctaattcttgcctgtggcagatcaggggtccaccactggacagcattcatgccatccatggccaggccacatctctgaagccatctgtgcaagcgtgtttgtgtgtgtgtgtgtgtaacaggaattagtaagaaaaccacaaaccacaaacttatgcagctgttggccatgtacattaatcaaaacacacactgaagtacagtcgtgtcgctttatgatgaggatacattctaagaaatgtgctgttaggcaatctatgatcatcttgtgaacatcatagagtgacttacacaaacctagatggtagatgcctactacacatccaggatacaaatgtgcacaacatgttactataccgaatagtgtaggcaattgtaacacaatggaaattgtctgcatatcaaaccacatctagcacagaaaaggttcagtaaaaacacagcactataatcttataggaccaccatcatatatgtggtctgccactgactgaaatgttacatgactatactatagtaacgtgacttatagttatacaacctattatagtctcaatataagagtaagaagcaaaatctccacacacacacacacacacacacacaaaatcctagtttcttttcttagatttcagtatggttatctaaaaaatccttaaaaataatcctgatttaattctatcagtatcacattagagcaaagcagtagtaacatgctaaattctaacatgttcagtctgtcataataaaaattacctcatttaacaacttatcttcctaaaaaactttgtatgtgttcacaaaccatttttcctaagacttttttttctttacatgggtcttagtttctacaaatcttgatatttacattcttaaaattactgtataatgcttaattcagtagagttcacatatggtaaatagtttagcaagtactaatttaaagttttagcatttcagcagacttttttcctacatcagaaataaacagataaatagataagtgaaaaaggaaggaaggaagaaaaaaaaacatgaaccatgcttcttccaggttaatgtttaagcctgctttaatcacgtcctttgatacactttaaggtccatatcagtcaaggcaaacattctaagggaccgagcagatggatgctgcagtttagaaagtgtgtggtaaactcaggatccaagagtggaacaaaagatccacctttttcataattaagcctctgattaatgccctaggctcctcagcacacacctgtaattactcacagaggtactcattgtgctgggacttgtctcggaatatcaggcatcaagctatccggcagcagatggaagcacatttctgttgacatatgttgcaatgaaaggattcgtgcaaacctggctagcaaggtagcagaatgccatgcatttgaagattaataatgcaaacaaccatgatgttaactttgttatgcttgtgttaattccatctgttgagatgtggaactaaaccttgaagcttgtgggctttaaaaatctttagcacatacttgaatcaaataagccccttttcaccactggaatttagagttttaattaaaaaatgcttttctaggctaaatttatgggaattatgaactaaatcctttaacaagctaataccacaatttgtaaatgaatccattttgcattgtaagatttgtatgtgtaaaggcaacaatctgtaaaatggggcattcaaaaaatatgactaagttgctatactgatgctaaagacagcagataggcatgtagctgagataaagtcacatggctccctcaccccctggacctcagccaatcacttcaacggaacctgctactatgagcaagaaggttggaaagagagggcaaaataacagatggctagcctaccctaccctgccacccacgtaagacagcgccctgaggagacacagcgcctgtgtgaagtcgccaaagacagcactgggggagggtaaatgggggggttaaagagggaactatatgaccagtcagccaaattatggccatatgcctgcttccgttgcttctccacactgaagtggaacaactcgaagactgtatctttgtgataacattttaaaattaggaataaccacgtggtactcaaagaagagccgctgcatattctcaatagtgggacatccacaaaatgccccactcatttctaactcagtagaatccttctttcaccatccccaccatacattaagacacagctataacagaagtctttgaaaaatataataaaaatctgaaaccttcctcacagcctccagggctttatatatacatgggaaagaatgatgctctcagacatgagtcattcatgtgcaatcctcatgccttttgccatctccctgtccaaagtgaacattacttgcctaacaggtttttcaaagtgactcatgttttaatttttttatttccataggtttttggggaacaggcgctatttggtcagatgagtaagttctttagtggtgatttgtgagattttgatgcacccatcacccaagcagtaagcactatacccaatttgtagtcttttatccctcatccccttccaccctttcccccaagtccccaaagtccactgtattattcttatgcctctgcgtactcagaacttagctcccacttatgagtgagaacatacaatgtttggttttccattcccgagttacttcgcttagaataatggcccaattattctgaaaaatttatgtgtatcctttctcataagtaaaaagtaactcaagtaatacaatgacagtaatcaatgctgctaaatttttgctaaaaataccatcctctgatgaagactctgggtctgagagcagctctccttgttgaatataagcacagaatgcaatgtcagggtggtgtgaaagaataacttctctcaactccagctggcctacctaacagtatcacaaggacctgcagagaggaggaaaggggccatcctttctactgtgtgattcaatgctattcagcgctgcctccactgagatggctagtgagaaacggccctgcactctgacgtggtgaaaagaactctagaacttgagccatgaggcctaggtccaaagccttgtgtgactgtgggcagatcatgtcatacccagagcttcatgcttctcttccgtaaaatgaaatgatactcccttacggagctgtatgtaatgggataggagataagaacatatgcctttgtaaaatgaaaagagccataaagaagtaagtagaatagcaagtaaataattatttttcaaaaagagaaggactctgaagagttttactttgtaaaatttactttataggtgtagtttgtataattcagtgaactattattttgctgatctacagaaagaatagtttaagacatttcaaaggtggcacacaaacaagcctcttagatcgcacattaccccagaaattcaaaagctctagaaattagtgctttcaagcaacacccttaacaaagctttacggcaattagccatagtgttttacaaggcaaatactgaaagaaaaacaggaaaattatcattttagattttctaggattcatttttctaaggagttctagaacttaatacaaagaagttcaagttagttttatagcaagaattagtttctttttcacacgttaaatagactaaaccacaaactaaacaataggctcaatgatatatggaatctaaaataaaatgaggtttattcttgagagttgaacatatgacacgtagacaaagatctttcacaagcttttgttcaaagaaattaaaattcatcctgcaaaatgttgcaatatagtgaacagatcaccaaactagtatttttctcttgctctggttaaaagtccaagtgaatactatacactgagtgtgaaaagatcactaagatgataattgtgaatctgtagcttatcaaaagattctggttatgagaaagtaactggtgagaacatctgtctcttatcactgatcttgcaaaaaatcaggtaattcaaatagaggcgtgttgtttcctctcctccaaagcacagttctataaacacaaaccatattcagcctggtaaatgaatcgctttaattgaatgctatgtacacagtaactggaaaaaccataagtgataagaaaaacatatggtgatggcaacagaaattggtttattcattttgcatagtgttgtttctttcgttcccttataattgacctttagagcgataaatgtgtaaaataattttgtttattatggctccaaaccttccaacaattacacaaaatgaaaatttaaaaggaaggattcgttctggaagcatttccattgtttacataattgcacagctataatttagtgctcatgttgttatggaaaataaaaaagggcgattacaggccatttcaattcaaaatattgcacagtggtgtcaaaatgggggaaaatgttcactttaaagcagtttaaaatggtttaaccctaaaaacaaaaacatttcaacatagcattctataaaacacaaatgttcaagaagtagccatcctccaaaccatattagaaatgttgcaactgtactttcacaccaattacatatatattattcacttaatatttgctcagggcccagcagatgatggttgtaacacaatagccagccatctgtctccctgcctttccttcgtggacttgcgcctgcttctcaagagcaaacagatccagttattccacctaaagtcactccgtccctccacgaggccagacacaatcatcaagaaataaaatctgcatatgaaaaatcactcaattcctcatttaactttttacttaaagaaaactaaacactacacagttagatgaattcatcactgttttttagagaagatgcctgtcttttacctaggaaattctataggaagctcttttatttggtaaagaggggaaggttgggatctgtttatcccagtaatctggctaacaaaaagatatgattcattctatacttggataattaattataaaaaatgtgaatgcagaggaatacattcatactatatatgaatataatttaaactttaacaatggagaagacagccacgatcctgcagtacttgtggacatatttttaagtattagttattgcccacctgctgaagttcagaaatgctgagtgacgagaaatttttagttaccagaagaccagatttgaagagacctcaaagctccaaggcctgattctctcatttctgctagtgggtctctgctccttcagcttagggcacaaggacatactttacatactacaagctgctacctggcttctgatgattaaaaaataaatcaaatcaacacggccctttaaaaacaaaacaaaacaaaacaaaacaaaacaaaaaacacagcagagcacggcgccaatacttcatttccagaaaagtcactgagaataagacagcaggacaaagctgaaaattactttcatgactggggccaaatatgtggtatgtgctttacattatgtgttaaaatggttaacttggtacatctgtctgggaaaaaagcagagattttaacaagtgttgtacacaatgtgacttcttagagtacaactatgttatgaaagccaggagaaatattacaggacagagtaattgggttctgcacctggagaatcaaaattgcctagtggcagggcatggtggctcatacctataattctagcactttaggaagccaaggcgggaggatcacttgagcccaggagttcaaaaccagcctgggtgacatatcaagacgctgcctctacaaaaaataaaaaaattagccaggtgtggtggtacactcctgtggtcctggctacttgggaagatgagatgggaggatcgcttgagcctgggacatcaaggctgcaatgagctgtaattgtaagactgcattccagcccaggcaacagagagcgaatctatcttaaaaaaaaacaaaacaaaacaaaacacaatacctagaacttctcaccagcagaactgccatgaagaagacactgaatgtccttgacagcagcatgctttagggaatgggaaacatgcaacaaactcctgaggccacaggagctgttctgagcatttgcacagcatcaagatttcaggagtgacagaacaagtggacagatggcagaaaaaggcactgtgatgctcaagcccaaaaggagaaccttgaatattttttataactgcttatctacaaagaaaaacttggctggcctttaaacagatgaagatggactgttctgcttcagaaaatgtggtatatagatttacttatttaaggaacaatgtacatgaattttattttataatgaagttgataactcactaatctgtctaaactgcctccttctcttggtaacagcttcaagatatatattcatatataatgaaattcaccctataaagtgtacaattcagtagtttttagtgtattcacagaattgtgcaaccgtagccactatttaatttgggagcattttcattacctcaaaatgaagcctataccaaaatgaagcaactatttcccatttctcatatacccagtaactggcaactactagtctactttctgtctccatgaatctgcctaccctggatatttcagcatatggaatcttactatatatatggcattttgtgtatggtttcttttacttaacatgttttcaaggttcatccacgttgtggcacataatactttattccttcttagttaataatacttaattccttcaaattaatattccattgtattgatacatgatgttttgttcgtcttttcatcagttgatgggcatttaagctgtttctaccttttggtgactggttttgatatgaatttctctggtgaataatgatgctgagtatcttttcatgttcttcttggccatttttatatcttctctggagaagtttaagtctatgtctttcacccattttttatttgggctgtctttttgttgctaagttataagacttctttaattttttaaattttcatttctttgtttatttttgagactaggttataaggctggctaattttcatatttttggtagaggtggggtttcaccatgttgtccaggcaggtctcaaatccctggcctcaagcaatccacctgtatcagcctccaaacgtgttgggataacaggcatgagccaccgtgcctggctgtgtaagacttctttatatattctagatactaggccctaatcagatatataatttcaaatattttgtgagttgtattttcacttgcttgatagcatcttttgaagcacaaaagattttaattttgatgaatgataatttatccatttttcttctgttgcttgcatatttggtttcatatctaaaagtttattggcaaattcaaggtcatggagacttagtcctttcctttctaagagttttaccattttagctctcatatttaggacacagaaccattttgagttaatttgtgtatatggtgtgaggtaggggtccaacttcatccatttgcatgagagtatccagttgtcccagcatcacctgttgaattgactattcttttccgactgaattgtctttgcacccttgtcaaaacatcagctgactatgggcttacgagtttacttctagactcttaattctattccattgatctatatgtttaacctttcaccaggaccacactgtttggattactctagctttttaggaacttttgaaataggaaactagtaattctctaattttgttccttttctagatggctttggttattcaagattccctccaattccatgtgaaatttaggatcagcttttccatttctgcaaaaaccaccattgaaattttgatagggattgtatggaatctacatgtcagtttggggagtactgctatcttaataatattaagtcttctgatccacggatatttttccatttatttaggtagtttttaaagtcctacagcaaggtttgcagttttcagtgcaagtcttgggttaaatttattcctaagtatttgattctttttgatgctattgtaaatagaattgctttcttaatttcattttaaattgtccatttctgttgtataaaaatacagttgatttttacatattgatcttgtatcctgcaatcttacataatttattagttctagtaggtttcttttttaagtgtgtgtgtatttcttgaggttttccaaatacaagatcatatatttgtcaatatacatatctttcatttttctttccagtctgaatggcttttatttcattttcttacctaagttcactgtctagaatctctggtacactgttgaaaagtggtgagaaaagacatccttgtcttgtccctgatcttagggagaacatcagagtttaaaatggaaatgcctgttatttctttggtgggaagaaagccagagccagaacttgtttggtggcaaacaagccctgggcaacctttttgcaatatatttttgcagcagcaaatgagtgctttctgcaaggatgctcagggtgctgtgagatcagggcctctaagaaagaaatgattctccatcagatgaatcagctcgctccctcagccccaagtcctttgctatgtgaacaaaacataaagccccttttctctgaccaacacaacaccctgcctgaagcccacagatcaagaggggctgctgtctttcacgtgtgcttcctataatgggcacttcacagctcactgaggagactgacagggagatggcaaacctattaggaaattctggcacatttataattccataagatgaggaaaactatttgtagggtcatggagagaagtgacttaccagctgcaccaatagtgccttgaagatgccgtggcctgactacgtaatgactgtcttagtcatgacaccgataagcttcaaatctacaccattacagtttgtacaacaggttggcttaatgaggttgatgcagatgctcaagagcagttattaaatcctcacaatgagactttagcaaatgagggcttcaacaagttgttgccagtaagtgataacagtggaagccactcagttgcatcagacacatgtgtaaggtgctctgagtgctagacgctggtacagaactccaaaagaaaatcaggcctcattgccaaagctcagggataagtctaaacagaaaggcatttatacagcaacaagaaagttactgggggctggggatgagggagggctggggtaggaggatactaaaatatttttctgaggtgcccaactgcttgtcttagaagaggctaaactgagccaagtgtctctgtttgtctcctccaccccctcctctacagctttacaatgttctctagcagaagcaaaaacagggtcactgccatcatagataaaaggatgggcggccgagcgtgatggcttatgcctgtaatcccagcactttgggaggccgaggtgggtggatcacctgaggtcaggagttcaagaccagcctggccaagatggtgaaaccccatctctactaaaaatacaaaaattagccgggcgtggtggtgggcacctgtaatcccagctactcagtaggctgaggcagggaattgcttgaacccaggaggcggaggttgcagtgagccaagatcgtgccactgcactccagcctgggcgacagagtgatactccgtcttaaaaaaaaaaggggtaagtaaaatgcacgtactgtgtgtaatcatgtaagtaaatattaaggtaagaattgccaaaatgagtcaaatgtgcacacacaaacataggtactgcagagtcagaaaactatacttttcccaggtttattattcacactgtctcaagaatgcatctactagaaatatattcttcttagaatattaaaaagaaacacttgagtgaaaccacagacttaacacagtcaggtgttgcttaaggtcatggctgcaagggcatagtaaagatttaatcgacactgccaatgatgccaagtaaaataatattctcattctaatgttggaatctaggttaggccccacctgcaccctatgttaccccagaatgaagtagaaaaaataagtacggaaaacacaacactactgaatttgggtaacaaaggtatttaacttactcctttggaaccataaaaacttagaaaagagatccgagagatcatcattcaatcttttaatttaacagacacggagaacggcatcaatcaaggccagaactgcagttaccagcaaggtttaaaaacaaacccaagcatcgtcctgttccttacaggaagggaaaatgttaattcagggtcaatgaagcaccatttaatattcgtgaataatgggcctcatatatagtgcacagtactattttttcaatttttttatttttttttgagactaagtttcattcttgttgcccaggctggagtgcagtggcgcaatctcggctcactgcaacctccacctcctaggttcaagcaattctcttgcctcagcctcccaagtagctgggattacaggcatccgccactacgcccggctaattttctgtattttcagtagagatggggcttcgccatgttggccaggctggtcttgaacttctgacctcaggtgatccacccgcctcagcctcccaaagtgctgggattacagggaaaaggcaccgcgcccagcctgcacagcactattttgaggacttacttagttttgaaacatgaatttttctttcatctcactcactttacctaataatcatttaaaaatgcaaataacaccttttaaaactatactttcaagtgaagtcaacagatgattgcttcagcttaaaaatatgcttccaaagataaacacgttaactcctactctcatagaagtattatcagatgaaggaactggctcataaatgctatcttcaaaataaagacaggtcttccaccaaagccatcttcttcggaaattactgggcatggggtgtaagggagtgtggaattgtgtgaggaggctgggggcggtgaggggaaatgcattagaaagatcttaagggggaaaaaaaagaaatttaccaggattccagcaacaaattaagattcctattcttccctgagaatgaacactagagaacatataccagctcttcgtggcttctgtgctcatttatctgtgatctcaactctgctaaaaaaaaaaaaaaaaaaagctcagggcttctaatgccatcacagactagcgtgccccatgcatttaaacatgcttccttctcatatggtgaaatcgggaagcctggctctcaggtttgggtgaaaatgagtctgcttcatggtactgacttttgccaggatgtttcccagcctatgcccaagaacagattaacaacaaaaaatgatttctgttcgttacttcccacaacttctggtttgttcccttatcagtaaagagattaattttagaatatgattattatccattcttttcattctaagaaaacacaaaatgcatgctctcttagtttattttcttacaagtaaaattactccacctgcacaaagcagcaaaactgaagctctcaacatttttgtgttctgcaaaaaaacagagggcaaccctgtggtcattcaattttgggactctaccgaccaaccctctaatgtgggtggaggcctggatgaattagaatgacaatctcccacccctcccatttagacaattcgtgtttagacaaagagctctcaagaatggctgaaatttgagagaacaatcccaacggaagccagctctatcaacctgcttatggagaaacctcaggccagatccactagcaaagcagcaataccaacaaacccgacactacacctgtcctgcccatcgtatgatgaaaagcccaccacatacaaatctcaccatggcagaaagcaaagaggtcaatcgacctctaaatggtggacaaatagcttgctgcttcaaattctaggaatacttattttacattttgatttttaatgtacatataacaaaactcattttaggggcctaaaaacaactttttttttaatgagatgctttaagtgtagatttttgagctaatgaggaaataggaggaggagggctttaaagataaaattccagtaaaagatacaactaatttgatagctgaacttgggcagatactttacctttcgaacaacaatttcgtcatctgtaaaatgggaatgaaaatgcatcatgccctgttgtactcttcaaaagggcaaaggagattgtaactgaaagcattttgtaaattccaaagttcataattattatttttattaaataacagcaacagttattcatgatcttattaaaatattaattttccaggatcatttgaaattctcaagtgctaactgggttgaaggtaccatgttagttgctgtgaggttctaaggcagcccctgccttccagcaatgacctgttaggggaagggaaagctactcatagctaagagtgaggccaccaagagcacagggctcttgcatgatggggacagcaggcatgccatgggaaccaaggaagggaagcaaataggtggcacaaggcactgggtcttgatgaagggaccatgctgcacgtgttcaactagactccagcacacaggaaaatggtaggtattttgttttaatgtcttattattaaaagcttctcttttgctaacatttctttagcccacaattacctaccaaaggatattttttccatgggagaacaaaagaaaaactgttgtttattgcttcttcagaaaacaatgttctctctaaaatgtgtttcagtaaatagcattaatagctgaacaatctgcaattaccacaataccacttattgttatgtattaaaaagaaatcaacagacaaaaagagattattccccacaaggagagcacttttctcacggaaacaaaaattgcaatttaaaatgcttttcttgacattatatccttctatccaagtctactctttatgaattataaaccacagtcatgatttaaatctcttatattcaaaaatcattcctctccaaatgggagttaatgtatcctccttccccaagtataactttagtacctgaaatgtctctagaagctattcctgtgtctctcagtgcctctgtgcctggagaaaaatgtaacatttcttaaagtcttcatagaactctaaatgagaaaagatggtcttacaggtcaatagctatattccaaagagcaggaaaatcccttctgcaatgaaatgtaccattgcctactgaaggcctaactatctttcccttcccaaagtcccagagtcatcagaaacccgtttcatggaataagcagcacaagccaaacaggctatgtatctgttcaccaattcatggatgcagtgacttgagtgcaaggctaggtagggctcaagctctaaagtgaatgttccctttttctgaggctgtcctagagcgtcagacagccttggactgaatactttagagcttgaaaggcttacaaacacagaacctatcacctgccatatttgaacagaaaactggatttagtgtctcctgatgatgagctagaatctacctattagtcctggctctgggtaaaacagtctctctcacacagcactgcttcagacatttgaaaaaggcaattatctgtctccatgcaccagcccttttccatgcaagctgttctctcagccatcctgcttcctcttagctactcaggcagtgctcatgcaagaagtggaacctgagcccccttcctgcctcctttcatacatacagtgccttgggctttgcagatgcaggccacacaactttctactttgggcttccagacaaaattcatctcagataattttcatgttaacttcagaattaatcagaacgttccatgttttatttcttaaactgatttttttagacagagaatttagtaagctgaaccattatgaaattgtaccccctttttgaaaactcatttaactcaacctgaaacattgactctcttaatctccctggttaaatttttgtatgcatttattcccttggttaagctaacagagtgagactttcatactgtctttgattactgagttgtgtcatttaatttatattacctagctcttttcttaggacaatgtcatctgcagaagtactcctttagggcaaggtttctcaacctcagcagtactgacatttttggtcataaattctttgttgtgtttctgtgcactacaggatatttaacaacatccctggctttcacccaccaaatgacagtgcactttatgacaaccaaaagtgtgtccagacattgccaaatgttccctggagggggcaaaattcccctgcccctcaagaatcactgttctagggtaatgaaagttgactagctcaccacagtagaaagttaatgcctgccttgaaactgatagttggagccaaaattgcaaccaaagtggctcagctcagctgctttggttacccattcttccccatgatgctgtgtagatttggaatagccagtctcagaagaaggtctttttttttttcttccattttctatcaatcaatatatctactgagcatctaccctctctgggaaaagacagaatgcactccagtgactctattaaaaaagattccggtgatctgggctctgtgacaggccacagtagagtctccttccagagagaaacctcagagcaaaagaacatgttctcaactgaaaaatgtatgccaactgatacacgatatcacacggtaacagtttactaagaacaaaatctttccttttcccacatatactgagagttgctatactatttttatgctttatttcacgtagcatgtcttattagataccggaagattttgggctaaatatacataattcatattcatgtctgataacatttacttgaaagaaagtctttacacctttaaatccaacaaaggaaaccaaacaaaactgtagtttctggcctgtcaggtagattttcttctctctggatcagcctccatgctatcatcttacactttttaaagctgtgaaacaagttcactgcacatgtgttaaacctcataaccgaaacctctgccatctgttacctcctacatatttttactttcctcattgaggtacaagtgggctctgtctacagattaatgaaaataattattgattctacagctataaaaaaaagaaaaaatatctcgcatttatttttggtgcagtcatctatctgaagtctttatggcgattgatagctgaataaagttataataaaactttcattgataaattttgatgaatctgtggcttgtccattcccacaaaaccttgtggaaaacactcggaaggcagtggatgctacctgatggtgtaacgttaattatatgacagcttctgtattttatcactctgaatttgtacaataagcacaaacaggaattatgattaacttaacaatacatgtcaggagaggactgtcatctctcacctgtccttataaatattatccttcaatcaaacctaagtcaaacttggaagttttgtttattgctacagtaaactccccttatattcaataatatttcattaacttgagtaaagtaaattcaggtcagaagttgtatttttagaaaaataaaaggacttgtttttaagtgctacattactttcagaaataattagtaacaaatatatgtcttggctaacaaaaacatcaattacagagccctttagatgtcccattttaataattataaatacatttacaatttgcataccaactgcttgaattccaacagaattagaaaatatgttctcttaagtacagagaaaatgtccctggaaatctttcctgcacatttctaattcctaacaggcaagaattctttggggacaccccttggtgtatcctcggatgcacccatttggcctgtcctatgctataatgtccaaggtgaggaagggtcatcaagacatgagtcgaaacttacagtccctttatcctatcatgcccacatgtcttccttttctcaattcatcttcttgcctttctgaaccaacatttgccttgacagataatgggaatcgtgccaggacactactttctcaggatgcttaccaatcagtactacatcctacctctccaacatatttctcacacacagacaaacacacacacacacacatgcacaaaacacatatgtgcatatatatacaaaatatatacacatataatgaattatacacatagacacacacacacacaaaccccatctgtgcctcagtccttgttagccctcattaccttgcccctgggctattataataatttcctttctgtgtttgttgtcatcattctttcatgattataattcacccccactttatcactgtggtttaagcttcttaaaatgctcttgtggtcatgtggagtatcatgctcaaaaaccttcaacagctccccactgtccatgggatgaaaactactttgaatcaaggctctctacagtgctgcctggattcatgaccatatattatttctacgcatatatctggcattaaatcaaagccactctagtcattgttcctgaacacagcctgaaaagttctgtatctttgatgtgaaactccatcatgcttcttgtcctgctatttaaatcctatccattcttgaaagtcctgctaaatcccctctcctttgtgagctgctttcaaatcaacttagctaaaaggatattcaacagttcaattttcataacatgtatatcactacttatttggtcttctgcacaagttgatggttagtacagatacttgtttatgcatctcacactctcataacctgactaggtctttaccatggcaggaaaaaatattcaacataaaaagatcattgaactttgtgccacatttaggaaggagtgatgtgaccctaataataaagtgcctaaaaataaatcagaggatctaagaatgcttaatgggaaagggtctgagaggctctctagcccaattcattcacttgactacttgtggataggtgagggccccatggccagtgagtgacaaagctgagtctagctctaaggtattttagttcccagtatcaggcctgccatccatgagagtcatatgttattcttgaaagtcaatatattctgaagccatcttatatcctgaattcttggaagtacattttccaattcttagaaaccttaggaataaggccccacattagtcctatttttacttgttgtataaacctatagttttttttaaactgtttttaaatgaagctttaacaaagttagccttctaaaggtctaaagttcctctactgatacacatcaaagttattatttcatcctcggaacatcagttagatctttaaattcacaaataagtactttatctgctagtgttgagttaaaatcctataaattaaaaccttggtaaaatcacttgctgtacagaatgagcactttagagacatgtattaaaattatttccagggatttgagataaacaaggcctccaatttgccatcctaattctttacctttcctggaactgaatactcacttatgtttcaccttaaatatactttgaaatttatgtttatctaacatatatggttccatagtaacaagtctaaattttcagcaaagaacaattctttgtctgagaaaaggtgatgcaattattacatatgactgcatgatacaggctgtctggggttattaaaagagtcaggtatggccaatttacaagtatcacccctgcaccttgctttcaaagctcactgctgagtcttaatgctcactgaggggcctcatgggatctttttacaaacgactgtttattattatattattccatcatatacctcatgagagggggttgtaacacccgttaagaaaatcatgaactactttgacttctgtgatagaatactgctctatatatgatgtttaaaattatggttttttttaacattgatgtgacaaaacgttcataaaaatgtggagttaaatgaaagcaaaatgttcctacaagctaaatattattgcctacaaaataagtggctaaaattttaaaaatacaaaaattaaattaatgctcaagtgcattcagcaactgaaatatgaaccagtgttgatcatgtattgccagtgaccagcacagcactttgcagagcagttactggctgagccagggtcttacttgcaggcaagagaatccactgttttgagattaagaagaaagagacttctatgagggtgttagatggtctggagaatgtctagaagtgccagggaaccaatcacaaatctccacagccaggaaaaagctggtaagcaggaacacccagccacatcacaaggctgttccagcagagcccactgtctgctcatctcaacagtgatggtggtgccggagcagaacctccatgacaggaggacccagatccccctgtgctgctgcccaccactccccacatctaccttcaagtgccatgttggctggtgtctctgctggacagaacctgggtcaatgccaacccagctgcaaggagtctgggacatgcagtgttcagctttctagctttccttgtacagaggctcattgggtggggtgaaaagtgagggaaagtgagccgatagccatggacacaaaagaagcatttctggatcataagcatacatgggtaaaacaaatgtatcaatcggtatgtctgtctacagcacagggagtggttatttctccacacgttgtaaaattccacaatgcctagttatgttttttagtcaaatcattatgttcaaagtaagaaaatgtatatggagaaagaaaaaaaatcaacactttaagatatcagaaataaatgatggtgttgctgttcttctccttacccttaatattattacaagagctcatgcttactaagggatcatatccatgatccagactgaatgcattacatgtttttacctctttcaagtcttcaaacaaccctctgaggtaggcactattattatcctcattcgatagataagggagccagagcacagcaaacccaaatgatttggctaataagtaacaaagccaagacaggaaatcagacaagctgacttgaggtccatgctcttaaccaatacactttatcacactctattacactagatcttaactttatgctgttatgatccaaatatgttacttcagggcagaacaacaaacacttctgcattggagagaggcctcatgcttttttggtgcattataaaacacaatattatagatgaaaatgacaaagacccacatttcccaaaatgtctatatgcatatttgcaacaataattttacattaatgtaggctttgcatttaaaagagaatttaactttgatgtataacagacaaattacattaagacattaaatctgtaagtcattgttaaaaaatagctcacttattttaagcaaagaaaaccttccagtctctgatacatgttcttacaaacatgaaaataaaattcctttcctcaactgtccttttccatttcacacatattgatctttccatctgttttaaataatcatgaaattaataaaaactgtttttaataaatccaaatcataggttctttcatgtcaaactattttggggaattctgatgtgaaaaagctgcttaagtgttaggaaaaactgagaacaacaagaaacagctttagaagagaaactgaaggatgatgaagaactgagaaggcaactgtggaaaggtctttccaggttggggcagggtagtttaataaggaggattctgaagtggagtaggaccaagggcagagcccaggcaaaataaaacggaagggagaaacaacatcaaggctgttggaccaatacgcttgctgtgaatcaataaaagaaaacatacctggtggaataagccaagcctgtatgtgaattctaacaggctttttagcctgtggcactgggcaaaagttttagatatttttttgaagtttcattatttataaaatgggcctcaggggcctgggtactatggctcacacctgtaatcccagcattttgggaggccaagacgggaggactgcttgagcccagtgagctatgattgtgtcactgcgctccagcctgggcaatggagcgataccccatctctaaaaaaaaaagcaataataaaataaaataaaataaaataaaataaaataaaataaaataaaataaaataaaataaaataggccatggtatttattgaattgaattgcagagaagattcaatagtacaacatcatgcagtccccagcacagagtccagcactgtgagtgctgaagaaataaatactcctaagcaccatcaccagcccaccctcagacacaaagcagctgagcagagggaagcgtactgggagactccttcacaggcaggccgggtagccctgaaagtcacgccaaattttcttcataatttatagttattttggaactgtttataatcctaattattttgtaaaccactaacatcaatttttaaaaaaaattcattgtcaaggaaaaaataaagccatttcaaaccatgttttcgatcacaccaatcaaccacgaacccatgttacatatgtaccgggggaaatactacttgataaattcattgtgttagtattacataagttattaggataaccaaaactggttaaaaatactaaaaacagttgctttggaatgcactacatttttctggctgtttggtatatgtattattattttttaagatacaaatggtcatgtctgtttacataataaatttgctatcatattagatgaaactataactttccaggattgccagagaacacaactcatgagacatctactttacaaattgttttttaaactaaaaaatgtcttcaattactatgaacatcattatgtttgaaaatactttttagcatcttataacttatttaattcaacactttattggtcactactgacataattttgataccttcagatttaagaaagaacttcatgaaacaaccaagccatacaaagcataatgttcaaaggcccatgaaccacaaagctgcgtcgtgcagacaagtgtgccacccagaggcaaaaggaagaaacccaccttggattttatttgtgagacaaaactgataatgttcaattttaaacaattatttatgattatttatttaaaaacacaggacatctttcataaggttctctctgcataaataaatccttttgctgctaggatacataaaagtgtggccctttgagaattctcacaaaatagaaagaagccctgagatggtaccagtcacaggtacatagtttgttaattaaaaaattgaatttaactgtattctctaccataaatgctttcttttctttttataattaatataacatgtgtttccagaattacataagttctgaaacaaccactatgatctatttagacgtgtggatcaaaagttaaactaattaccagagacatttcttaacttaaatgaaaaaaagtttctttcattaggtcttctgcgtaattttcatctggcaaaggaataaagtttacttagagtaattctgtttggcagacagtcagcgcttctaaaatatataacaataattgttaaggttaaagaaaacagtcaactctattaaactcacataaaaattcaagcttctaactaagcctaaataataggctgattttaaatagagatttatgatatcctcatttcatcttagaagtctgaatgttgggattactgttagcattggaccatcttttaagatttatgtattccactatgaactataaaagatattgagccttaacttaattaaaaacataacatgcattaagatgtaaaaacaattttaagcacaaaatttggaaattcttttgtctatactataaaattgtatttcttgaaaatgatttataaaataatttttttcaggttctcaaatgttatataatatactcttatttcatctcattttactgtttcatttccacatcaacacatcttaaaatagaaagacaattctaaactcatttatgtgactttctaaaaaattcattctaaggaacattgtttactgctaacttacttgtttttataaaatgagaaggatctatagttgattattatttccaagtaaattttttttcctgcaaaatattagcataaggcttctttaaagtagggtattgttaagtaaaccttcctcttttgtttctttcactgaaggagttcattattatctgagagttaattgtcttttctataccccataatcctccacataccctgagttgcatcattctgtaaaagatgcttccacttgcaatgatgcctgtaaaatatttgagcagggagtacaaacaattctactttgtgttcctatttctacatttatctaggaaataaatgagattatgggactaagccagcctgctacatggatgtcctctatacactgctaaaatcacaatgaatatgacagactactcactaggacagtatggttattatttcatataagagttcaatgatttttaaagctcaaagtaagtattgggaaatacatactgcaaactatttaaattcaagtacattctaaagcaacaaaaaaagtttgcttatcaggagaataacttcttacatgtaccctgaggtatcaaaaggtctgtgtgtctgcatcataccttcaacgaatacaaaaaatgcagaaaggacagttacttgatagttaataaatgattcaagttcattaataagtatttacaatttaaagggtaaatctcaaacactccctatacctctatattggttaagaaaacctagtaataaaatgaaatgtcttaaaatttattgaatcttttctattcctttctttccatccccaatgctaccggcttagttcttatcatttttttaaaatctgtattaaacacttcctaattgttctccatctacaggccaatctctgattctatcctactatcacattttcaaatccatcttccaaatgcagtccagaatctctgtgaagcataaatcaatcacatcacttgcctgcttgatatcccaaatcaagtcaagaatccatgtgtccctatccgtaatctccctcaactggcagaagtcttcccaagggaggaaggtcagggtctggccacaccctatctcccaaacctagggcctacaaggaggaagaggtagctagtggctccttgggcctttctgttcgaacttgaaccaaacttaaattgcattgggagaaattaaaataactccttatcaagaaatgtctggactcatcttctatcttacaggtaaagtctttcacaaaaacatcctaactactaaaacaacaattttcaaacatttttaaatgatcagtaccactttcttcaaaccatatttaatgcagaacccaaacaaaaagtggttataatagtattttgaggttgacaacacaggcagaggttagatcatagaggccatagaataaaattaaaatttggttggcacaatgcaaatgcaaagtcagtggggagaagaagcagggatgtgaaacctgatttacatttttgaaagaccattgtgcttgctgtgtgtaaaagagttgaaactactgagaaattcaacacttctgatgtattttcataaatattactaatgtctttaaagagtgatatgctatttccaattaatgggcaatcacaataaaggagtcgcagaatacctgatcctcgctggttaatcccaggtgcatcacaaggtaaaaatgcaccaggaaatctgagtttggcagaacgtcctggcgtctggtcatcatggcacagatcagcctgtaggcttgtagtttgccttccttatattcatttggcagtgtcgccgcctgtcaaggagatgatgtttccagattaaatcaagcccaggtgcagagtatttcaacatttcatttacttctcagttttccttaagagttgtttatggacatgtgggatgcagttactttagtaagacccagcctgtcttcaaaacatgcagtcttgggcaattacatttttcaaactcaatttcagaaaggaagaggaaatcgcaataaaggaataaacacatatccacttgccttaaacagccatgatgcaaacattctgagtggtgggatcaaaactggaggagatggagaagactggttatccaggcttattgctagattatcccgtatctaattcacaaagaggagaattttagggtaggtaacattacgtttatcccaacagtatttcaacagtcttctgtgaccatatagctgctttcagttaatttctataagtgaaaacctgtaatatttacaagtttctcttttattgtgaaattatccttttgaattacatgtttggcttactgtatgtggttttagatttatatacaaaacaaaggcattgtttttccttgaacgttaatggctggggaggtcctgaattccaaacgataagtaacattttaatgagttatactgaacaaacatgaaccatgtttttgaaaaaaaaatttaatacatgtgaatgtcagaacccaaacaaaaatcagaataaaaattgtatgtactactcaggaggctaaagcaggagaattgcttgaacccaggaggcagagggttgcagtgagccaagatggcgccactgcactccagcctgggcgacagggcaagcaagactccatttcaaaaaaaaaaaaaaaacttgtatgtactctaagattctactttcataaaaagaaagaagactatatattaatattggctatttctatgaatactgatgttaattttcttctttgtatttttctacatttttcaaattgtatacaatacaaccaatatcacttttataaagagagtaactagaatgacttaacatcctgtatttaatatcctatagcaatattctacttttgcactaaatgaaataacttttgcatttataaaatagtcatgttatatatgattattctttgataatcaaatggactttgtctaaatgtaccatttgtgtttcggaatatgttcagtagttaactgaaacacagtttttacattaaatgataagaccattttcctggattagaataaaaagtaacatagcagaacttacctttgctagtttgtaccagagttcatagagatagcagaaaactctggcatggatcttgggtgactggatgttattcacatctccgaggatccccaagacccttcgccataacacagcagcagagtctgggtgccaaccagtgaggctccccccggcgattatactacagtcatctgtgaggcactcgctgctatctatgcagaaaaacatgtctgttaaccctgtaaacaatcttgatttcatcataccttttttctttaaggcaaattaccttaggtattcaaagtaaaataattaaggcaaaaaatgtgaaacagctgagaatttaaaaggagagaaaagcaggatcaaggaagaaaggtcaaatgattttgattcttcaaactaaaagagcaacaagctaagacatgacataacagttcctggagaccctgtgatgggttttatagatcaggggagaggaagagggagacccttgagcaggatgggtgggaaacagtgccatggaaatgggtggccagggaagcctcaatgctggagtaacatctgcggtggttgttgttaggtcaggttcatgggggtgaaatgtgcatacaagaaatttccatccctttcaggtttaaggagttttaaggaatgtatacgttcatgcaactgttgccataaactgccaccataattgaaatatggaggatctcatcactccaaaaagtgccccttcataattggtccccttcctctattctcagcctcttgcaactactgctttgttctctgttcctatagttttgccttttccagaatgtcacatgaatgaaattctacagtttgtagcctgtctggtttctttcactcagcaaaatgcatttgagattcatctgtacagttgtgggtatcagttgtctcttcttattactgattaatattctattttacagatgtgtcatagtttatccattcacctgtagatatttagatttgttcctgttttttggcaattatgaatacagttgctataaacattcatgtacaagcttttgtgttaacatgtttacatttctcttaagtaaatatctaggagtgagattcctgggtccggtcataagtgtatgcttaataaacattaaactgaagaaagaaactgtcaaactgttgtccaaagtgctgttacggtttgcactcctgcaagcaaagtatgagagagttccacttgttctacatccttgctagaacttgatactgttggtttttaaaattttaaccattcttataggcatgcagcagtatctcactgaggttttcatttgcagttctccagtgactaaagattttaagcatgcagtgatatgtgactcgaacttgaagacaatgtgcaaatgggctgtgcagctctgtggggaagagtcagttagggagaagagctagagcaaaggctgtgagataggagtgtgctaacaagttcaaggcatagaatgtctttgtaatatatatttaattatgaaatatgaaactgtgcattgaaacaaatagttaatgaagaatttaatgatttacatgtatatctaattttaccgattaagttatagaattttgttctttggatacctgttgctttagtatgagtaaaggctagaagactgatttgagtacgtctccagcttcctaaaataagcctttgaatttttagagtaaacagaaaagcagccaaagacacacaggcaccacttaaagaatgatgtattataacaaaaaaatttatttcatagtatgtatgtaataatcaacagaggcaagcattttaactgcacattgtattttctcactcttcatccttttgacttcattgcagcatttaacgcttcttctcaggccctttttagacaattctatctctatttgcttccatgaccaagcacattcctctaatctctcgcagctcagtttttaaattctggattccacatctccaacctgcagcctttgcacaaagttcagtctctgttctcatgtgtcatagcctcagcccccatgtgttctatccctcttctccactggcatggtgcttgagtaggccaccaaagacttccatgttgtttaatgtagtgctcaatgtccagtcctcagcagcatttgattcaggtaatcatgtctcctttctgaaatgcttcaaccatttgacccccaggtatgactctcacctggtcttcttttgctggtgcttcttcatctcacagactgtggacactgaagagccctggagcttttgtcttctctatctatactcatgcccctcttaatctcatacagatttactgccagacatatttgaatgccatccatatactcacagctctacatgcccatttctggcctagatttctttcctcaagtttaaactcatttctccaacaacatatttgacagctctacatgctcaggactgaactgaagcagaaaccataagcaggcatggtctttggtcagtttcactgtgttcctgaagaacctcagatatatgtatgttgagtttgttttttttttttttcctggaattcaaaagactctcttcctgctcaaagagtatgaaaactctcctttaatccctctgttttcaagacagcatctctgcactcagacgtgttggtgactccaagccagaacccgcctaatttactttcaccattttctagggtgaaaaagcagtggccagtggcaacagagctctaactagttcttaaacagacttacagtcttcctgtttttagccccatcatcacctcctacttttgtagctacctggtatgggaaattttctaacccttttagagaacccgcattaatttaagtcaggttgtttcttggcttcccctattactgacacaggatttaatattctcaggtctgccaattaatttaccacaggccacctgttctgcaacttcaagaagttggttgctactgtctttctcctgccatctttgtccttgtggatttatgtcttatttaatataaatcctttcaatgtggcttaagtacggtttggagaataagtggggctatttgtgtttgttcactctactgtctttaataatatgcattattataatttatgtctttgttactcatttctcttgcttatttttaaaagccacttattttataatttttgttgttggctttaatgcatttatatttggtaattttttcctgaattagtctttttaaaataaaatttattttttaagaacaattttggatttataaaaaattgtgacaataatatagtttccatatactccgtatctaatttctccactattaacatcttatattcgaatggaatatttattacaacaaaccaatactaaaagattattataaagtctacacttcattgagatttccttagtttttaggtaattcttttttctgttccaggatctcatccaggatatcacataacaaatagctgtcatgtctccatagcctccttttgactgtgagttttcttaaaactttgtttttgatgaccttcatggtttttaaggagtactggctttatagattgttcctcaattggaatctattggatatctttctcataggcttttcttttgcattcctggaatgaacttctcttagccctgatgtatgatatttttccaacattcttcaatctcatttattattgctttatttagaattttttgcttatatgtttataagtgagatggtctctaattatgtttttttcatactgaccttgtgtggtttgtttcaaggtaacataaggtagataacagaagtgagtttctctttctacggaatgggatgaaaaaggtaaagtttctcttttacatgaaggtttagtaaagctagaaattatcctttatttttatagatctatttgaatagcatactgtattattttaaaaatttatattggtttcgtagttgttcccttttcacctccaacattttttcttgatcagtcttgcctgtttgtctatttttattagtgttttcaaagaacaatttttagttgtcttctaactattatttgctttctagtacatgcatgtatgctctcagctttattagttccttttttattaacatgtatgttattctgttattcttttcctaatttttgaatagaacacattgtgttaatttattaacataattattcccaaagttctcttcttcaccccatacaaataaagccggactgatttctaggcaattatcagtccccactgagtgtcatctcgagtgtatatgttgttggcatttttaaggcctaatcaaagaaactgaagcacaatctctggatctgaggaactcaagtagaggaatgacaagggcaacaaaaggcaagaaaaaaatgaaactgaaaaggagggcaggtccaaaaatggctgctcactataataagctatgcttattaaattagtgatggaaagatcccaagacacacataaaaaaagatgtaataatgatggcacatggtgtcttggaaaggccttcccaaacacagaagcactgttccttcttagaggaaaacacacctgtagttcccacaagagtatcatatactcaactcaggagacacatcaaaatgtgcaaatatcatccaaactggaattcctacacactgtgcctgaaaggcagagtgcaaaaaacctaattatgggccttctgggttctctgacttttataaaacctcggaagaaagactcatcatcctaattctgtaaagtaagtacaatatcaggcatctgttagtctgaaaaggtatgctgaagcatcaataaatgcttatgaatcaacatgagcccccaagtgaacaagaagcataatatggcatttatttttctcataaaggatgtcatggcatttttcaatcccttgaggagaaaaaaaaagtaaggggattagataatttacagctttgtttcatcgctggttaaaccttcactccaaaaatgtagctatccaaaacagagattggtccccagcatcccaatcacactggagatttgcttgagtaaccactccaagtacatgtagacagatacctcatcatcacctgcacctcttttcaacctgccaacgaatatgcccttacttatgaaagaatcccacatagaaaatctgcttcagtactgctttacactcagaaaaattcatgcctcaatgataaaatcctaggcaacatcctccataaaattatcaaggtacgctgacttctttaggagtttctgagatgcctgtatgagtttcctcagtattactatgaacaaaaatgttaatgagttgaaatgttttgcccaaaattactctgctggtggcgtaagtgacagaacagatgctgacattttacatgtagagggttcctcagtgaaggagcacttaattaaaaatgggaatttaagagacttcagacaatttcacgttcaccctaaaaatacccaatatttattttattttatttttcattagcagcctagtatgctagcctgctatctttttgttttattactacttaatgctatacgggtgtttaaaatttttttattaaagtgaaaactcttacaagcataattgtatcatctttctccaaacacataaataatttttacaaagagatctaaaagtttagaactttgcaaatatagaaaggatttcagccacaaaataagtcttggtagttggcaaaataagcatttaaggccaaatggtgatttaatatggctgcaattttatataagctaggcacagtgttaaagaaatgtagcctcggtctctgaaaaaaattttccttttgatttgaaaactaaacataaaaaacaaactcaaaggcctgagtgaaacaacttaattctagagccagaaaattcaggcctggcctggatgtcaatgatcaagtggagaaacagtaagatggcatcctgctcccaccagtgcagcctggctctcctctccttcttccactccttttcaaggatgtccactgctcactgcaaagatttcagaaggtgagctaccaatgccccagtagctatcattattatttttctttctaatatttcatgacttcgaaacacatcaaagtctggtggaaatgccaaaaatataggcgatgacagagaatgctgacaaagcattcttggaaaaacaattttagtggcaggtaacaggagctgtaattcatattcacagccataattaaaagcagaagtggcaaaaaaatttctgtaacatttggatgcaagactgtgataaccacactaaataaaagagattttgaaattgtcttatgtattatttctaaaaaattaaaatttaattgctcttttcagctatataaaacaacagcttgcagcttaaagtgtatttgttcgctgattcaagtatttattaaatgcttctctcctgtcctgcaatattctcggaagcaagaatcagctgtgcacatagcagacaacaggcgtccccctcctggagtctgcattccagtagagaaagaccttggaatctcccaactaaaccaagatgctagataacatttctcaccaaaccttactttaaaagttatcactgagctaacaagaacatggaaagaaaagagcaacaaagctggctttttccctttgtggttctgctaaaccacagaattcttaaaagtttctctggtaatgcagttttcattttgctgaggttgaattactgacactttttttatggttagctattttttaaaaaaaatcatagaaccttttaaaaaagacgttttcttccaaaagtttttaaattttccttttcacatttatgtactttatccctctgaaactgactttggacatggcgtgaggtaggaattctatttcatttttttccatatggctaagtacttgtcccacagaaatgtgttgaacaatacattgtttccttgtcagacctgacaagccacatatatcatatatcatgattccatgtctgtgtgcactcagtgctatattttatcttctgttccatccgtctatttgtctatctctatgattacaactttaagtaaatgtcatagaatttatcacattatttgtgactattaggataaatgttgtgtcttctgtcctttttataagctcttaaaaactatagtggcttatgacttattcatctttttatttctcagagcatctaaatcagtatttctagactataagcttatttgttaaataagggatgaggtaaatgacaatactgattcttagctgtagactcataaatgtccccctcccctgactatttcaacagaactaaatgtatgcatgtcttaagtatattttcttattttctgtcttctcaatgctctggcattagggcctcactgatcagggaaggactgccacttccagggttagctaattcctagagatagaagtctattcaccaggcagcatgtctttcacatgcaaacctaccaattcaaaattcagaccctccaactacctcctttctctagttctcacatactaagtcaatatcccctgccctgtcatcctaggactgggtaccaggaaactagaaacagcccgtatgctccagagcccactgaagtcattcatattagtaatcctaaaactgcataccctgccttgccttgctatttccatagaaatgacactaaaagcggttgccccattttgttccttctgcctcctggtacttccctgcatgacccctgtttccagggatccgtgagtataaacttcttcctccatgacaatcatttccatgtctgtatgtcttaccacatctgattaaaacaaatcccaggtaaactttaagacaatgcacagtaaatttagctgttattttcagcaaacatgatttaatgagaaagcaaatataaaagtaaacagtttgccagtgatgaaggaatttaagattttggaggcagtttattattctaagcatttgataactggtaggattattcaataagaaacaaagatataatcaaattgtttctctttgcatgtcctaaaaatcaggctcatatgagttttattttgaacatttatgaagaaattgctctcttaagaacagaaagttaaattcagaactgtgataatccttaagccttatcacattacagtttgtccttttcacagatgacaaggtgaactattgaactgcgtgtactgattctctatattagtatttcaaagaagaacggagtatttggaggagttaatcacaacatggagtgcatcatataaaattacctcacagaggtttattaaattgagctgtccaatacataccctgaaatgggatcaaaactaatctttccaaagaacagacaaaagaagtaatcacctaattttcttccctttcaataaaaataattaaaactagtccatgtttaagtaaattcaacctactgaagcttcagttttgcctcctacagtaccacaatgatgactttcttttggataatctgtaaggattctcaagtaggtcaaagggctttacagtaattttaattttaacaggaacacagtgtaaaggagtagacatagcactgcacgttgagtcaaaacattttggaagccagtttcatctctggaactcacactccagcttgataacaatttctctgggtctcaatctccccatctctaaaacagacatgataagacttggcctgcttcccatacagaatcaaagagaatgcctcaaaattctttgtaaatgttgaatctcatatcaatgtatagtattattagtcaaaatcattatttagtctataaagaattttactgaataccaccttcatatgttaattttatgaagttttaatgacattctatcaagaatttcccaaatatcagagacgttagttaaattttaaatcacagtgaaaaccagtttgcttggtttaaaaaaaaaaatccatttaaggtcaaattttagcctttatgttaatcattttaaaatattttttggcattttaataacactcttaacatgttactttgtggtggttgttttcatacaagatacctgtgtgtgaacatgaatgtgcatccataaaagtcttggctctggtcagcctttcccgcactgattcctcagaccacgagtctctcctgacactccacaaaacaaagcaaaaccaaacccagctcctccatggcctccccgttctcatcagcctggtcaaacaggtgagggaaactgacctttgaggttgacttacccagtgtcacacagtgtgtgtgtgtgtgtgtgtgtgtgtgtgtgtgtgtctgtgtgtgtgtagctaaaactgcagactacaccacacacaatattttgggcacctgacttagatgttcactcatttattcttccaacagccttcataaagtacgggctattatcccaaatttaaaggcaaagaaacaaaaggacagagattaaataactagctcaaggccacccagcaattcctcggaggtgcctggaagccgacccagaaagtttggctctgaagtcaaacaatctgaggttaaaaaagttgcaaaaaatacagagtatgaagtcattttttttaagtttagaaacaaaactaaatgatatattgcttgacacacacggtaaaactataaagaaatcaaggaaattagtataaaaacaaatttggactagggtcccaagataatgggagaaggggagggacttgagaaggacctctaggagacctcactggcttgggtgccctgctagttcttaagttgggtagtagactcactcgtgttcacttcattactgttccccgtaacttacatactgtatatgttacaacttacattttatgtatcaaaatactttatttaaaaattaatcaataagctatctaaactctttgacttatcctggatttataacatgtatgagttggaaaaatcactcttctttctagcatagaacaattcagtcagggatagtaaaggcttgacatgaataccatcacttcctcctatggtggacagtggtcaggagcatggcacacttcctcctacaactgtttcagaaccctctgtatacaagactccaatgattcacaactgatctcccagctgtttgcattagtgcctctttttcaaaatgcaatttacctgttaaatttgaagcatcggtgggactcagttgtaaccaatgacgggcatcagcatcagccacaacatctgtgggagtattcagttctgggtcttcctcacaggtctgccatgggcccatggacagctctgcctcattggtacagcccagagttgtgtcactgttggtactttcacctggtacaatggaagaaccaaagtttaagataaaaaatagctgaaaatcagaatgttcacaattactgatacgaaagtaactaaacaaacagcagacacagtaggaatcattcatgttctttggcagaacctgcagaacttgagaggagctcaaaaagtgtccacgtggggctcttggtcaagaaaatgaatcttccaaataaggatattaatagccattatgagcaccactatgtatcattcaagtggcactcttcaacgtgtcttcactcagtaccccctacacccaaactacaccaagtcctaaagtgtgctgggacttacaaaatgaggatgggtggaggaagaagataataactgatccaccacaaatgcaagtttactctaccgggtagaagagtctaaagatgctgtatgccccaagcctgacaggtagacgtagacctagggtgactcattcagggtcatctggggatatagtgtcccaatacaacagattttctagaacagaaattctcccctttaaacagtaataagttctaatttatcataatataataaggctaggccacaaagacttatagaactatttagtctgacataaaatgaacctagacacttctgcttctcagagtctcctgtctacttcataacaactttatgcatctacatctctgtctgctcacccttctggctgctctctgtatctactcctaacagtcccttactcttgctgtttctaatctgctgtcctctatttactcacaaagaactaaaagttgtctcagtaaccaggtgaccaatggtaggtcccaaacttcatctcctaaagagctctaagctagcagggtgaaggtagaactcctctgcacccatcaagaactgtcctgaacttgaggaggtgtttactttgctactctggcacctgacttcaggaaagcagagtactaaggctgtattttacaatatatgataatacgtctcaggattccaatctcattccatttctaagtatttaacccattgacttcaatgtacttctgatgctttttgcttctagcctctgggaactttctggggaagataatttttctctccggtctatctgctcactcatgccatcagtctctgatgtaccactcacctggagaaaggtccaggggtagaaagacaggcctctcaaggtacgggtgagtagaactgttttattatatgtatggatgaaccttttgtcaatcctaggattccaggaataagaaggtcccatttcacaaccatttctctcaaattgataagctattactcaagttagaaggtaaaaagtgggaagatggcttgagcccagtcattcaaaaccagcctgggcaacatggcaaaacctcatctctataaaaaatagaaaaatcagccaagcgcattgacatgtgcctgtagtcccagctactcagaaggattgggtgggaggatcacctgagcccagggaggttgaggctgcagtgagccatgattgtgccagagcactccagcctgggcgaaagagtgagactgagtctctaataataataataataaaatgtaaaaagaaaatagaacatatcaactctgtagttggaggaacagacatttcccggaacttactcttctgtctttccctacattttccttgtgtctgctgcaaatcatctttcaaatccaattcagcagggctgctgcttcttcgaactaagatcttcagacaaaaagaaatattgcatttactacaggaaagttttcattgttataagacttaagtttctagcccaaatttctaaagaaaaagaaacaaataataataatagctaaataaattgatgttttccatttgaaggatatgttttcacaaatcactatatttaattttatgttactcaagatctgaaactttaatttatatcctctactttgtcaacttacatccatccaattaaattgatctaagaaggaatgctaaattatatggaaggaatttgttttaaagttctatttgttcttctggtcaggcacacatatattgtgaacacaatgctctaggaggcataagttatgcacacaaatgataagtgtgctggtagggaaggcgcaaactccacccagagatctaaaggtccattcagtgtcttcctagttaagcatgccacagactctcctgagcattgcttaaccttgtattaaattcacaggattaaaaaaaaatcaggaggaaatctgcatcctctaataagttataatttgcttggagagacaaaacatacacaaattacacaaaataattataatgtatataagcaaaatatgcaaataaactgcctctgaaggggatgcagaataaactgttgccttaattggctcagctttataggagagctgttcaagacagcaatggacatgaagtggtagagggaagacaggaggggattcaaggcaggaagtactgggtggtaatcagcaagttctatgtacaggaagagatgctggttataccaggccatgcagggcacccaggtgaagaaggacaaaaataagaaatgcagaccttctaaaaagacacagctgccagtgggccttgaaccttaggttcaagtggggaacaagatgtagagttaaaagaaaaaaaagaatgccccacaaatgttgaccatggcaaaactggaaaaaaaattaaaagaaagaataattattaagctaataaaaagcaagccatgaataaaatatttagaagatttagaggattaacactatatgaaaaaactattacacagccttaaagaagaatgatacatatctaatgtgctaagaggaaatatgcacagaatatttccttagttaaaaaacagaatgtagactcttctgcttctaactatatgagagacacaatacctcccagccatagaaccagatcctacataaaactttagttgcaatttggggctcacaggaagtaaaagaaacttccaagaaatctaccttcaacccttaaaagtgagcagaaaccagggcagtgaaacgtggctattgcaagggtaaatccaatagtaccactgccagtggcaagaggaccaagactccaggattaaagtagcactctccatgtggtgcaagaaacaaatgcaaacatactgttgaaatgtcatcaatttagaaatccacgttttctgcagattaagatcagccagctaggaacccataataaaacatcaccaaacactaaagaaaataaatcaccatgtgtaagaatctcagaaacaacaaatatcagatttagatcccccaaggatttcagataatcagataaaaaattcagaattgcaatttgtaaacattttaaaggaataaaagttggaatcacaaaaacaagcaagcaacaaaagattattagaaattacaagatatgcttgaaaagtataaacgtgaactgtcagaaataaaaggcataattgctaaactaaaaaattcaatggaaatattaacagtaaagataaagttactgaactgatgaaagacagagctgataaaattatccaggaaacaccaagccaatgagaatagaaaatataaaaaacatttaagagacaaggaagacagaatgggaaagtctaatatatttccacccagaattccaggaggaaagcaaagagagaatataaaagaggcaatatttgtgttcttttttttaaaaccccagtgtcccatgtaacaggtggagataccactgtaccaatgaggaaaaaatgagacaatatatgcagaaatgttaccaagaattttccagaaatgacagaagacaagcacttacagatgcatggcacatagcatataccaaaaagaacaaacatacgaaccaaaagattcctgcacctaaatatactatagtgaaatggaaggaaaaggacaaacaaaaacagcaaggaacaataaccagacaggaccggatggacagaagacttctcagcaacaaagaaagacaaaagattatggaaaaataacttccattagaaggaaaagggagaaagaggtgggaaaactatagtaactgagatgttgtactgtccgaaagataaagtaaccaagaatcaagataagaaacaccaaaaggaggccttacatatctcagaaatagcacatatgaaagagaggtggcatttcagatcaataaagaaaaattaattcaataaatgggacctgacacaagtagttatctattcaggaaaaaaaatgaaattggatccctacctcactccataaacaggaatcaattccaaatatataaaagacttaaatttgtagagcaaacctgaaacatttataaatataatatttttattcctgtgtagttgagacttttaaaaaattccataaagcctcaacaataaaaatgataatagagaatatcaaaatgaagaacttctgttcatcaaaagataccctagagaaggtaaaaatataaaccatatattggaagaagatatttgctacaaacataaccaaaataggatcagtattcataccatacaaagagctagtaaatataaataaagagaaaaagacaaaaaatagaaaaacaacaaaggacatcagtaggcatttcacagatgaaacaaaaatggccaataaacatatgggaagatttttaaccttattagtagtctaagaaatacaaaataagacatcttattttcactcagttgaccaataaaaatgaaaaaatctgataatagaaagtgttggcaagaatgaagatgaatgggagctctacacaatgctggcaaaaatatgagtgatgcaaccactttagagaacaggggttatcttgtaaagaaattattttattctataagtcattaattccattcctagatagccatcatagagaaaacattaaacatgcagatgctgaaacacatacaagaatgtacatggctacagttttcacaaaaacaaaaagctggaaacaatctaaatgtcaaccaacaagagaatgaaaaaataaattgtggtctacttatagtggaataccacatcacagaaaacttgatgaactattgctacatagcacaatgtgaataaatcttaaaaatatgtaactgagtaaacaaagcaacaatactttattaaaaaattcaaaagtaaggacaactaaagaacatcctgtttagagatacatagttacatagcaaaactacagagcaaagcaaggggatgatgaacacaaagccaagataaggcccctctctgaggggagatagcagagagagggaacaaggaaggagtgtagaagccaaaatgatctgaagctgatggtgggtttctgggtatttatttcattgctgaaaacagaatatacaaatgtaaactggtacatgccctttttaaaaataaagaaaaaagaaacataacatgggttattgtccagtgggaggggagcaaggagaggccttcccttttttattttgtatctttctgtgatgtttgagttttctaagaatatatgctacattttaaaaaaatgaataggggttatctgcatgaatgagttatgggcttatgttttaattttcttctttatactttatatatatttaaataaatgccattttatgttttttgttttttgttttttttaagaaacctaacatctttgtgaatactcactgattctagtaattcatgtcaggtagaggctacctaaatggatgtcaggaatggggaatctgaaacgtaggtttaacaggcaaaggtaactgcttaaaaatacacagtgccatacacagaccaggtggtgaactccattttcatgttaatttttttcctatttttgtaatgtgactgtaattttacatagaaagcaagcaaaatcttaaaagatctcaacatcatttgggcctataaactgtctaaatggaaaaaaatattttaattatcactgccaccaataaatttacttactgagcactaattaatgtttatttttaatgacaaactgaaatggcttgaaaatatcttactgttattccttcatgttctctcttcacatgtcctttattctcttgaataggctgaggctctgaagaactcgaattctgtgtgttttctgccttttgacctagaaatggtggggcaggggggtagcggaaatagaaggaatgtttcagatagtaaaaccggaaaatgattttatatataggtaactattaaatttaaatattctaaggtatgtaaaaacaggagttatgggcctggcaaaacagcagcctatgggtcaagtccacactttagacctggtctctggcccacagagagctctgaagagagtggattgattactgttcactgtggccaacaggttcacttagcgcatttatgttcgcacaggggagggcaacaaaacccttcctggggtcttggggaaggtatctcagagaaaaagtgcctgtgttggccagatgaaccaacaggaagaagagagcagtaaggtgcctcagtattgcttgagaataaagattgacgaaagcacaaataaccagtttcagtaataaaaaagggaatatcaccacaaagcctgaaaacactaaagctgatcataagaggattttatgaataatctgggggcaataaatttgaaaaaaaaaaaaaatttttttctacaaaaacataatttatcaaagtcagaacaagaaatggaaaatctaaatagtcctataactattttattttaacttttttaattttttaacttgacatataaaaattatattaatataatatgtataatatattgttttgaaatatgtgtatacactgtgcaacggctaaattaagctaattaacatgtatcacatacttttttgtggtgagaacacttaaaatctactctcttagcaattttcaagaatacaatacactgttacaaattacagtcaccatactgtacaacacatttcttgaacttattcctcctccataagtgaaattatgttaaaatataaatgatattttaaaacattcctacaagaaaaatgcaggcaactggtagtttctaccaaatatgtataaaaaaaaagccttatacaaaacctttcaaaaatctttcagataatacattttctgaagcttttactgtattttcttatttccagaggatttctaagacagaataattccctactcatctgatgagactagcatgactttgacattaaaagatatgagataacttgttgataaatagagttgatttcttaactaattcatgacaccaaaacagaataactatttccaatgatactagacacactttaagcacactctttcattgagaaatctattcttcactgtttacaggtcaaaccatctgtctccctgctttccacaccctgttgctgctgcaagttgttggtgaaaccgtgtagattaatgctattaaaagttattattttccatctcagcagagtcggcaagctgttaataaactttttcacaagtctggtcagctttccattctcattttcaactttaacggctcttctcacagccctttccctatgtccctgcccccatcctgcctccctgccttccataatacctaacttgatgccctacttgacttcatgttgtaacagcctccgtcttccttctactccagccacttggactcctgtctcgtcctcaaacatgccaacctttaaaaaagtgggtatatatctacatatagatatataaaaataatttagataaacaggtttaaatagtgcaaatatttcattgccataaatcacatccttctaatcaaattaaaaaggtaattcccttgaaataaatatattcagaatatatgtacaaagcaatactatatgcagcttttattcctctgccagaatctatagttctgtattaaacactgaagacatcatgtaccctgagaagaatctgagcacagcggctcggggatgtcggaggtgctgctgctccgaaggacctgctgctgctgtcccactgtgagatggccagatccggctgcaggtgcattttctgactgttgacactcctccacttctgtgagcattaacaaaacatgcaaagttacagttcaagtttttaaaaaacacattcaccacttaaaacaaccgatttaaaaaataaagtttcaaatgcttttcacaaataatttatagtcagataatctgcatttaaatgatcaagtttcctacacttgctaacccctaatattctactccaagagtaccttttccacttaagttctataaagccttttatttttcaatcaaagtaaaggaaaaaaagccacaataaaaggttaagaactgtaaaagtcatttgacatttcagggccaggcatgccaaggaaagagagattcaggagatgcacagaatgggtaatgtacatttgagaagaacagaaaaccacacacacacacacacacacacatacaccctgaaggaagatgaaaggaaatgtgggaatttctactgcattatgcctttttaacaggtaagtgcccaactgtccaaaataaaatgctatagttatgtaatggcttatttcatcaaatgcaatgctgaattattctctaaagtacagaatgatccacaggtatttgtagaaaaccaatatatatgagacataaaatagaaaaccatagctgggtagggaccacaggataatctcagtattattacaagctatattcccctatagaatgagttccccccagctcatttctaaactgcacagtacactttaatctctaaagaccacccaaggcactggaattatcaccccaccctctctttctagagtcacagcttcagggttgcaccaccttttacgtaggttgttttaatagcctgcaaactaatcactaatcactgtccctctcttcttaccaccttcatatttatcctctccatggtccatctaaaataaagatctggctgtgccactcctcttaaaacccaccaaagccctctcttgttagagattcgtcaaacatcctagtcagggtgaacacaggctttccttgatctcacgggacatactgatccccttgcaaggtactctagctcactttagtctccagtagtactaacccagttggcacctgctactctgttcttcctgctgttcactcccctatgctaaactcacacctgctccctcatccctccttaccatgctgccctgggaatatcccctacaggacctgctccctggccctgcatgcaagccccattgctctgtttctcactagattccacactcactgacgtagtcatgaaactttacatccacataactagaatattttccacaaattttaatttgctcattactactactaagaagaggataatcaaaactcagcctgtattatcttaactggctgggtcacctggtttgtcacctgaaatggaaactcactgtcaatgggccaccctctgtataatcctttaatctgagtcataaggcaaactgatggctcaccttaagcaagaagtatgttggaagattctacatttaatacagaggatttcaacaaaaggttgctattttttctatccaaatgaaaatgcattttatagtgtgctgatatggttacaagacctcaaaactatgaaatttgtgtgatccttcacttacaaaaatttatcaatttactttttttttttgctctgttgccaggttggagtgcagtggtgtgatcacagctcactgcacactcgacccccctggctcaactgattctcacacctcaccctcctgagtacctgggagttctggtgcacaccactatacccaaaaaatttttgtcttttcacagagatggggttttgccatgttgcctaggctggtctcaagtagtccgcccacctcggccttccaaagtgctgggattgcaggcgtgggccatggtgcccagcccacagtctaacttcagatgctggtgggaaactgtttggagtacaagcaaagataggccaaggtagcaagaaaagacagctatgttaaagcctcatgtttcccaggttgtctttgccttcctcttcttttgaacagccaagaactgttcatttttctacagagaaacacaaagcatatgtgcacatttttaatctacttacacatcccaaagtacagactacgtccttctcacagatctatttctagtctcttcagccttcagcaacagaagccaaataacaccatagggccagcccttccggctgtcttctctaattgtttattctaattatgcaagatgttgaaaccttctgggaacagtttatatttgttaatgaatctactggttaatccagtatcagaagggggagcccaagagcttcctaactttctaaactataattggcaaatgccattttttatggatagtgggaagagttagtctctgaagcctgatgccaaaaacagatagatgttggtttctgggctatgagcaggagcaaataagagctgagccaacactggcagcatcttcctaaagataaagaacatcgccatctggtgggatgcaatatagccacagcaccattgcttccaaattagagcgtccccactggtcctcaacacagcagacggacggagagcctgccaccaccagctggtctgccttcccaacaggctggcctaatgcagcttttaaggctttgtttttataaagctgtcaggagggacgtatcagatggagaaagtccaagccttcaggaatagcggtcagtagcagggcaggagcactcgtgatttagtgggaaggaaggggagagccacgatgcttaagtgtgctgttgggttgtaggtgccctgagctacctactcctgtagttgactatcaattgagatggtgtgaaaagagaattttcaattctccttatcccacaatttaaatccaatttcctgatttgtaacagtatatttattgggattttctcatattttatattaaatacatgttttgtataaatgaatacatgaatgacagaaacaatttctttatactatttttcctttttaaatagttcttgggctccctctgctggcattttatttaagaaagagcaatttatgttaaatctgctctcattctgtggggttagctgttagcagttgctctttcataacgaatgaaaatcattttaatagtgatatgcaaataccaaaagacaggattatctgatatttaaaatggagaaagaattatatcagttacaataaaattatataatacatcctagatctattgcattttctattttgaatatcacacaatttgtttaaatcacttcaaagagctaaattctatcttagattcaccaaataatgtactctctctaaagcctagttagttccaactacccagattttaaaagcactaactttctcgtctcttgacagtgtaagttacacaataccattactaaactattactttcttttttttttttttttttgagatggagtctcgctctgtcggccaggctggagcacaatggcgtgatcttgactcactgcaagctccacctcccaagttcatggcattctcctgcctcagcctcccaagcagctgggactacaggcacacaactggctagttttttgtatttttagtaaagatggggtttcaccgtgttagccagggtggtctcgatctcctgacctcatgatccacccgccttggcctcccaaagtattgggattacaaagtgagccactgcgcccggcctaaactattactttctaaagctccattcgaaacaccgaaaaatgatcaaataaggattacttaatttcatttttttccactgagaaaaggcagtgtgatcaaattaagtgtgtaagctcttcagtaacttctatttttttttccagatctctatttttcacagcaatttcactcactttttaagtcttccttactcagtcttacatttagtaagtggagtgaggctcattcttcaataaccaaaattctgagttccatttatcccttatacaaggttgcataagcaaaataaatagtataatttcctaatttttaaaacaccttgcatgataccaatctgatcctataaaaagcataggaaatgcatatcagctcagcatcttgaggtttcccacaagatcaaacttcccaagggtaaatcagaccaggtcctgacaaaaaagcacttcctagaagcacacaaaccagatgcagaagcagcgaggcaaggtttgccataccattccaatatgcttttttagaataaggggagattgttgatcctctcattactactattacaatattcctaaaagaaaaataaaatctactatctgtaagtgctacagattgataaatgttttaacctaaaaagcagttaaaattgtagaacagaccggacgtggtggctcacacctgtaattccagcactttgggaggccgaggtgggtagatcacaagctcaggaattcaagaccagcctggtcaacatggtgaaaccctatctctactaaaaatacaaaaacttagctgtgcatggcatgcctgtaatcctggctactcgggaggctgaagcaggagaattgcttgaactgggacctgggaggcagaggttgcagtgggccaagatcgcaccagtgcactccagcctgaggtacaaagcaagactctatctcaaaaaaaaacaaacaaaaaacaaacaaacaaaaaaactgtagaacagctggaaagaactgttctcacgaagggaaaaaaacaaataaaagaaaatcacaaaaagtgccagtcctacctccccaactgtgtttctttatgtagctattcatattaatggaaacaggtggttgtgactccaaaatacaaacgtcacttcttcctcccagaatatgaacaacccacccaaaattctgctgctgccgccaaatacagtccccaaaagatcagaaaaacaaacaatcgtagctaaaagtaagtaattgtctattgcttatattattaaaacaattttggtgggtttctaaatcacatagattagaaacaaaaacaaaaaaagttaaatgtaaacaaaattagcaatcatgttaacttaaatgtaaacaaaattagcaatcattgatagggtaaggagcttgtgccagaaagtaaaattaagtgtcatattatctagcagtatgttggtggggtatgcctacatacttggatttaaattggagggcaaattcaatactctaatgtgccaaccagtggagaatatacaatctgcccttgggtcagtctcttgataggacagtcataaaggacaatggcaacattttaagtagtaaagaaccaatggcatcaggctaagaagctcactatcatagttggaatgtcaggttgttctcaaagtcactatactctaaagttctttcaccctttgtgctacaaaaccaagaacaaagatggcaaaggcaggaaaactgcagaccgagcccaggccacttgatttcactctgacttaggatttctcagcctcggcacagctggtattttgggccagacaattctttgtttgggagctgtcctgtgcattgcagactattcagcagcatccctgacttccatccacaagctgccactagcactgtcccacttgtgacaattaaaaatgtctccaggcattgttgaaattgtccccaattgagaatcactgctctaaatcacatttaacttcagttggaactgtatacgtatatacaggaaccaagagtcttagtaaaataaaatgtaatattgaatgagaacaaaagcttccaaaattaaattactaataggaagagatttcttgtgggaacatgttctggacaaactagtgaaaaacttaagagaaacaaaatatagaaaaaaatggactgtgacataagaaaacttttcaccatgaaaaaaattcttttggggtgtgtattagccaaacagggggtaaaatcattttaaatactttattaatcatctccaaacaatagctttttttgaaaaccaaataattgggcagttaaaactcaacagtaatgtaattgactagtgaccattttcccatgtaccattcttactgtttttcacctttaatagttactggagaaaaagagttttctaagaaacattatagtcctcgctcttggtaaaacttcttcccttaaattctataaagtaatatggtatttacatagccatcagagaacgtaagctttcattttgctttgctaaaacacagtatgacatagtttagtactacagaaagccacaattaggttatctccaatgttaaaaaaaatactaatctttgggaggctgaggcaggtgggtcacgaagtcaggagttcaagacctgcctggccaacatggtgaaacctcatctctactaaaaatacaaaaattagccaggtgtgatggcacacacctgtagtcctagctactcgggaggctgaggcaggagaactgcttgaacccgggaagcagaggttgcagtgagccgagatcatgccactgcactccagcctgggcaacagagagagattctgtctcaaaaaaatcaaaaacaacaacaacaaaaaatactaatctacaacgccaaatttctgaaaataaaaaagatcatgaaaatgatctttctcttttaaggaagaagattcagttcatcctagaatcactgaaaaataaatagacataggcctaattattcaatatagagaaaggtaaatccttctgttgaagtaagtaggccaaaaatgacttttggtgctatgatatcttaataaaaaatgtactgtgtgtaaatcacacatggctaaattcaattttaattggctgaagtacaggaacaacgtttctttgttttggaaattactgctttttggcactggtccttttgcactcaaatttcaatagtataaatctatataactggtcattacttcacatatatgatttattaactccaagtagatcccgcctacatacatttttctagtttattcattttttggaaggcatagtaagcattctaatactgacattctcaaaacttttatgaaaatccccttactttctatgggcactgtatagaagacacactaaggcaggcatcacatttccccctattaaatagctatggactgaaaaacccttctatccttcttaattgttattgccaagaccaaagttatagaaatttttcttgactatctaattgccattaagtatctaactacacaagagcaattactagcattcattgcaatttaacactagtgtaatggtcaggcacgtgtgtgatgtggggatattaacaaaggaagcaatgcccagaggcaagcgggagaagcccaggaacagtgatggacacatgagacagtattacagtacctgacagcctgtgagagcaagaagagtaagagagaccaggtaagagagcgctcacggtgtgaaggaggagcgggacgcttttagtggcaggcaaagcctcagaaaggtggacacagttgctgatagactggcttcgcttagcttccaggagagataaagtaataattatgtcagaagaacaataggacctttcactttattattattacttttctgggctctctttaaacatttaaaggaggtcatttaaacttttaaactttaaaggaagtcagtacaaagtatagtatttaattgtagtctctaaatacagccaactttcagtcagtcattctcatgacacaggacaatgggcaatccacaaataattttattttgaaatgctttatatgtttagcctttccttctttctgctgtgtatcagattcacattcaggttatttgcctggacagacattataatcagttttcctttcctaaaggacaaatacaaaaagaccatggtgagagagggcatatctggccttcattcagaagttggtttgctgagagctgactgtattcaaaagcaaatcatttagtaaattaaatatccaaaaagctcaagaacacataaaagtcaagttgaacattaaaagatttgatatttgaggaaaaggtaaaatctccatgaaacccatccttttatgtcacatttcatgcttattaaatccatacatcttaagtgtctactttacggtgttcttatgttttctatatactgctagtcaaataaatattggaggaattgaatgaacataggaggaaaacgtgcttcatatatgtaaaaccacaatctgtaaaatcagttttattctaaaacaaaaatataaagatttacttgctgctttactattttcatatgacatcagttaacattaatgaaatggaactacaaatgatagtaacacatttgcaaaaaccggaacaaactttttaccctactgccctttctcctaccctttgcctattcgaattcccaataggctgggagcctgtaatcccaacactttggaaggccaagacaggcaaatcacctgagatcaggagttcaagaccagcctgaccgacatggtgaaaccccatctctactaaaaatacaaaaattagctgggcatggtggtgcatgcctgtaatcccagctactcgggaggctgaggtggtagaatcgcttgaacctgggaggtagaggttgcaatgagccaagatcacaccactgcacttcagcctgggcttttttttaagactctgtctcaaaaaaaataaaaaataaaaaaaaaatccaatgatagaagagctgggcatggcagctcactcctgtaatcccagcactttgggaaacagagacgggcagatcacctaaggtaaggagtacgagaacagtctggccaacatggcgaaaccccgtctctactgaagaaaaaaaaaattagcctggcatagtggtgcgcacctgtagtcccagctactcaggaggctgaggcaggagaatcgcttgaacctgggaggcagaggttgcaatgagctgagatcgctccactgcggttcagcctgaacaacagcatgagactccgactcaaaaaacaaaacaaaaaaagaatccaatgataaaagcaaatagtttttaggaattggaatgagaaaggaaatcagtgaatgagcatcctcaaaagttgcctgctaacaaagaattgggtctctcctcaggggagagaatgacagaaagaaagaaagaagcagaataggctgtgcatgtaaataaggtgataatttccagcaaatgctacagcaaaaaagtatgagagagttacagttaaggtggaatatattttcataaaaactccaacaggattctaaaccatctgtattaagcctttactaagcactatagaatatgttaagctttaatgaatctttgttttatggccagaggatcttgcgactttctgaagtcaacatgttaaatatcaattacaattgtcttaaacctaagttacaggctcaaagtcactggggaggaggtggctttatttattcttattaaatgccgtatacaagcttctttttaaagagttcactttttgttttaaaagtaaaatgtagggcgggcgcagtggctcacgcctgtaatcccagcattttgggaggccgaggcgggcagatcacgaggtcaggaattcgagaccagcctgaccaacatggtgaaaccctgtttctactaaaaatacaaaaattagccgggcgtcgtggcacgcgcctgtaatctcagctactcaggaggctgaggcaggaaaattgcttgaacccggaaggcagaggttgcagtgagctgagatcacaccattgcatttcagcctgggcgtcagagcgagactctgtctcaaaaaaaaagaaaagagaagagaagaaaagaaaagaaaagaaaaaaagagtaaaatgtagcaaagtagtccaattaactgggggttgttggtcaagttgttaactgaaatacgctgcaaagataacatccacaggcatgaaaaggctcaattttccaaaggagcaaaaaatgaaaatgtctatccagtcctgaaattctccttttctttgctgaaacaggttgccacactctaaagattaatattgtttaacactgacaatagtgcaactactggtgtatttattaacaatctattttcttcaaggttcaaacaaaacctgtattttctctatttcgcacaaatatctcactcaatatcaacatcacaagttctttctcacaatggaggatttagaaataagtaactgaaaactgtgatttgaaaagtaaccagagcataaagctaaaaagatgtagagacatttcatttaatataaggtctaatatttaaattttgagtagaatttttaacacactttatgcctataaatttattttagataacaattagatttttgagaagcatttaaataaatgtttaccagttgctttttggcgaacaatatttcttgccttttccactcccggtgctccagacgtggtggcactcctaaatcgcatcggttcggtcacatctgggtggctccgccagctgagagaaaaggacctccccacggtggttcctttctgaggatctagaacacagcctgataaaggaaaagaaaaataatctaaaggctgaattcattattattcatttcacgcttgtgttgctcagcaaatggtgtacctacaactatatataatcagcaggtttccttgtcacaaattaagtaccacttccttacactgcaatttaggaagttgctcatatgtcactaatttaagaattcttgttgccaaaatattttcaagaatctaaaacagtcttatggatattattatatcttcatagtactcattccaatatacaaaagaaagtattaataaacctttctcaatacaagaacaatatcaaatgaagttatactactgttcccaggacactccaaaaaccactacttataaaccaaaaactcagagatcctgatgttagaatagtactgcatcctgtagacaccaacccctccacaaatccccagagcaatccatgcctataaactctaatgtggattcagtcaaatgggcaggataatgaaaatctacaaataatacaaaatcctattttagcaaaggtccaaaacaataaaacattgtagtctgagattcaacttttatttttcctcatattgttctggttaattatttcaatgagaggctatggaccaaaagaaatagaggaggaaagagaatggcagacttacagatttctgcacaggtatgatgtggccagtggctgccacctgtggcatgtttccacacccagtttcctctgcctgtgctttttgtttctagtagtctagcccttagaaggcaagtgtttctataataaatatttaaatcctttttagaataaagcaacataaatcagaaatattagtcatggtcactaattaaataatgtgttcggtacattttgaaaacagtgttttcgaagttgtttgccttcctaagataagtctgtctctttagatgaatctgtgggtaggaagagaatcttgcagaatggcaggcgtgtgtgtgtgtgtgtgtgtgtgtgtgtgtgtagtgtatgcacacatgtgcactcgtgcatggattacaacaattgaaggtaggtccttatctcctatttcagctctcctcctctggcctgaaaggtatccttagccaggtaagttctcttctgggctgagaacgactgtcttagggaggcaagttcctagttggaagtatctgggtcctctcaggccccgggtttacacaaaggtcctcagagctgtcagagaggactagatggacgccaagggcccagactcttggctccctgcccctacttcaatcctaaatctccagtctatttctttagaaaggagttgtgtataccttcaaccgggaagaaaaacggatctgttaaaaatgttagaaaatcattgcattagacagtctaaatctacattgggattaaactgttccactggattgccatgtacttcaactactttattttggcttcttactaacttgcttttattaattagtgctttggcaagccattctcagatttcaatgaagatataagaatccaccacatttattatacgtgtatatggtttactaaccactgtaactggttcacacctccctgtatccacatcctctgttgttctctcctgtaatgacattaggcttcatcacgtgacttacttggtagcaaaactgaacaagcagagacttgaaatgcacttgaaaatttgagcttaccctcttactgcccctgaaactctaagccacttggtgaacaagcctgagctagcctctggctgctgaaacacgtggcccagtcacacctcattgcccctgctgacagccagtcaacccgtaaaagtagagctgcctagctgactatttcacagcgtggttgactgcaaacacagaagcaaagaccagcagaagaactgactggctgagtccaacccaaattgccaactcatcaaatcaagataaataagtggttgttattttaagccataagttttggggtgatttgtcacatggcaaaagcacactgatactgtctataaggcagctggtattattaaagggtagtctacacaataagcagtgtgtaccctttaagaagctttgaaggaaaaattcctcccaagtctcaggaggacctaataaaagctaagcatcacctaagtgattgaattgtttttaccctatgtgctctgtgattctctatttgatgtaaccctgcaaagaccaaaatcaaatccaatgtttgacttttccatctccccagcaagcccacgaggctctatggcatgtattttggcattttaatcacaatggcagttccctgcaacctcactcattttgaccctattttgtatttgatctactgtactatatgcctttctatgagctgcctcaaatctttacagagtaaggtgtagtacaagtgaattaatccaaggaccatgccacatccttaagcacagtaattaaggggatgccaaattgtcattcctaatagaaactaccactgatgttttctaccttgaaaacataactttcatttgaggttctcagtcccaaaacaacttttacccagaaatacaacaaagccaaaatagctcccatctgaagcattcagaatttctccacgtttcctagagaggctgtagaatgcatcttaatagtgtgacatcttgagttgtatttatccagctttgatttctaaacacttcttaactatgtggccttggatgagtcaatcactgtaaggcaaccttgtccaacccgtgacccatgggccacatgaagccaagaatggctttgagtgtagaccaacacaaattcgtaaactttcttaaaacattatgagattttttttttttttgcaatttctttttttgttttagctcatcagctatcgttagttttactgtattttatgtgtgacctaagacaattcttccaatgtggcctggggaagccaaaggattggacatccctgcaaagtctctgtacttcagtttctttgtctgtgatatggggataatacaagtatctacagttcactaggttattatgaaggtaaaaagagataatatgtacaatgtaatagccattattattactgttagttatcactactattactactaccttccttgcatcttccttcttgcatagcttcctcagaaattcaccatctcattaagggaacagaatgatatgagacacaaattaatgccactattaagaagacactgtgtagttggttcagttcattataaaatttcgcgcattaattgcttagtcatacaaatacacactcgtccccagtcctagacatctggtgttaacctggaagagtggaaatacctttgcctcgttgcttcttttccttttgttcacttaatttatccagaggtaggtttgtcatctcaactccataaacggttcttgcaagcactgctgtcaaggagtccataatgttggcccactcgtttataagttcctcccattccgtgagggaggacagcacaccaagaaagtcatcccagagctctcgagaaatgtacacacagaggtttgctcggatccaagctaccatgagcgtctaaaaccaaccaaccaacaagagaattcacacatcttcatttggaaaaagcatacttttaaacaaaatgttttaaattactattaataacacaaattttaaaataaaaagtacttttggaagttgtttttcttttaattctcaaaattcatttgaccaactataatcaaaatttaagctattggggagttagttatcattatgaacaaagttactgattcaatattgttctagtgtctgcagctggccctggctataatcagagaaaagacaaagccctccgcacagtgacaactctgcttcctgagactgctcttttcctaccatccacagtggctacttcaaacctcctacaggaaaaccgccagcccaccaaatcctccctgactttgagcagatggattcactgcagacttcacaagaaacagaacccattcaatgagactcccctcaacctctgcccatggactcacattcttgcccatattcacccagctccacctccacctgtgggctgaactccaagaggggccccgctctgctaccctgttgcccccttacactctggaccccttcctcggagtcttcatgcctctcttaaccacccctctcctttaatctccagccaaccccacttccccagctctttctcttcagcatttaaatatactccaaactcttcctcatcttaaaagaaaaaattcccttgaacccagattcccccgtctagctacagcccttttccttccattttcacagccaaacttcttgaacgaatgttccacacccgctccatctccacttcctcatcccccaggcaacagactgctctggttctcccctttctgaggccacttccaccttctgcctgagttttggctccattcccatggctccagttatcctctgtgtgctgctgacttctgaatctccatgtccagcttagacctctctactggtttcctgatctatctacctaggtactagacagtgctacttacacaaccctcaggcacctatcaaagagcataatagtaaaaggtattcaatttcttccactgactttctctcagtgccttcacctgctcgctcctgcatctggcctttgcacatactcttccttccctctctttcctcctttttgtttctgtataactccccctcatttctcaggtcaaaatttgtgcatcacttcctccaagaaggtatccttgactatctccccaccaccacctcccagcctccaggaagtgtcctccaggtccctgcattttccccccatcaatgcacctatcacacctttccttcacagtctattcacttatcagtgtctgcccccagtcttatagtccacagcactacaactggtcacctggacagccctatgagacaattatgcctatatgctggatatttccttcccataaaattgccccattccttacctctgccaaaatattcaccatcctttaaaattcaaatccaaatatatcttccctgaaagaagtgcctctacatagccaagtccatctcaaatgagccacaaatgctttcctaagccttgtgaaaaggaatccttatacccaaagtctatgtaagtcccatagcctggtgtcaaagagaaatgcacttgttaagataccagcttgcatgtgcattggcccaacccagatgcaaataggctcccactcttgtcaggaattcttctttgcgtaggtgagttcacttcttaatttttttccccaaattatatatagattttttaatggaatttactctttaacatagatacaggaaaactctgataaacagaaatcagtctataaaatcagacaggcctattctgaccacctggaaaatcttatttaaagtggtccttctgtaatacgcctgttctctgtttcaatttgtgtttaccactttttaagaacataaaaatgttaaagtaggactaaagtagttaattatataaaaaacaagatattaaccacttatatttaaagtctgattctaacatgtatgaacttggtaaaactaaaaatatgaaagaaaataaaataattttatctttattaaatattttattatgactaaaatgccatctcctattaatttttatacccctgctttcaagatgaatttgaggccattgccataacgtacctatagacaataaaattaataaatattagatcaataaatataatctgagccaagtaagagaagaaagtagagactgataatgttattaggactcagactcacatttggatatagcgccagcttcatggataaaagcagatgtcttggtgtaatgagatgctctatactggggatcttataatggcttcactttattgactaattatgaaacaagcgcagaatgacttcttgcagcttataaaatcaacttagcaaatattacaaacatgtatgcagacctgttgaattatcatcataattcacaactgacaacacgtgcacagagcaaaatggtaaaatggtaaaatacagttgggtggtgagtggtggcacctgtggacatgaaggcagggtgtccttttaatcaattaccattttctaaaaggaagagggaaacaaacagcctggactaccctggtttgtgacctaggaaagtcacttggcctttctgtagtcacatttctcattaaaaataagaagtgcataagagcttctccaaggttccttcagtactgaaatttgatgttttatcagatacattttggcacacaagatgtattttaaaaacaccttaactaataaatcactcctgttcttatgaacatttgctaaccaaccacttcctacttcactctaccaacacactaaggggactgcgtaactttaaagtaatggctcatattacaaagagcaggaccacagtttcctgatataccatcagagcttcaagcataaggtcatatttagcactgataataaattaaaacatcacttaaggcaataaggcagtcaccattatttggtaaatatttaaaactaagtcaaattcagtcatcacttaaagaaaatttggtggcccaggttatctactgacagaaaaaaaaacaaacactagaagaactagaaaaagataaaaagggtaataaaaacttaaaaatgtcccgtcccttttaacagtctccttgttctcaatttttcaaaaaaaaatcaagtgtctagccattttagacagtccacatgatcaaatgaatactaattagatagcatgttttaacggcagcgtgggaccaagatgatgcccaatagagagcctggctggtaagtccagacccttagtattcttgcctcttgcatctcacgtaagaacgtgggaggtcaacagatgatcacaaatcccaatgggcccactctgattctcatgacaaccctgcagggtaagaagaagtcctttcctgattgtgacagattagggaagacactcagaaagctaaagtcatgtgctcaaggccacatagccagagagtagcagagctgagatcagaaacacaatctgcctaatgccaaaaagctcatcctctcttcactattttttatggtaggtttttttgtttgttttttgagacagggtcttgctcttttgaccaggctgcagcacagtgatgcaatcatagcttgcttacagcctcaacctcccgggttcaagcaatcttcccacctcagctcccaagtaactgaaacttcaggtgcatgccactatggctggataatttttttaaaattttttgtagagacaggggtctcactctattgcccaggctgcttttgaattcatgggctcaagcaatcctcctgcctcagcctcccaaagtgctgggattacaagtgtaagccaccatgcccagccttttggttagttcttaatttaagcatccttctcgatctacctaaccactgccaaaataataacaacatcaaaatcattaataatcatgaactcaaaactaagtttcagggaagtcaggttaactgagcttcagggaagtcaggtcatctgaggagggaagtaatatctgacaaggttttctccattcatggggggagtttttttttccccaaagatcaaaaccaaccaaccaaccaaaaacaaaacaaaacaaaaaaatccgaaccccagaatagatacttgtttaattctgtgacaagttctctaattccaacacacaaaacagatgcagagccaggcaattggtgggaataaggcccaagcatctgccagtgtgagactggcttcagctcatgtccacttggcagcccaggtccaggacggggagctcgaaagggtgccaacagtgagacgcttcgctgagaaagcaaagtgtgcagtgtccatatgtccaggcaggcagcaaagcagtggtcagtaccaccctccacgcatcagcagagcaaagctggacacatgcaaaagaaagtttagggccacttcacacatccaatgtaccaggcaaggcaatcagagtaaaagcaattgtaatattcaggaggccaattatttcaatagcctctcatacattttttatcaagccaagagcattgactcatattaagttattcaaaattccgttatcttgtgttacaatggcaatatttagctttaaagaaataatttctccttttgtcacttttacctacatgtcctacccatattctagatatgctttttaacatatatcctccaaaaccaccttcaggtcaactgaggagggaagttaatttctcctccccacaactatcacctatgtaattatccaaagtcaagtccatccactgtactaatatctttatttatgtagaatgtagcatttttccagagccctttcacactgttcactttcagtaatgcttcataaactctaaggtcctcataaatattagcaacatcacagtaggctgccatgctcaggactctctggcacatctgttccccaggcagctcaccaggtatcagcctgctcttggtcttcacctgctcaccacatgagatgcaagaagcacaggcatctctttggctctctgctcgcaccaaagaccggcccagccctccaccatatccgggacctcacttatcctctgtctccccaagaccatcttgtcctccctcactggaccatcccattggtgagcaaacatactttagtaccacccaccttaaacctcgcccaccatgtatgccaccgacttcagctagctccccttttcctcttcctttccacagcaagaactctgcaaagccttaactacacttgcaacttccactgcccagctctcattttctcctccatctactccaggtgggactcatcccatagaacattctcaaccaactacatctgtcaaagcccatggtcaactggctgctctcctcctacccaatactcatccccaggcacccaggatacacactcctctggttttcctcctcactcactggccaccctttctcagcatctctcccatcacctgtggacattgtcctctctaggtaagcccatcctgtggctttaaatacaattgcccaacacactgatggctctcaaagttttatcccattcccatactttcgttcatcctttacctctccaaatctacctagccttccaccaaggccatcagagcttcctaattcctaccacccttgagcaaattaaaagaggaagtaggtagcagagagggagaaaagcctaaaagcccagcactaattgtaaagaacagatcataaccttcaggacaaagctaagaagaaaaatttctagaaatttaaatttaatattatttttaaaattctcaatgattaaaactagtttgctacaaaatctgattcatttcttgcatttgcagtgctttcataaaaaagacttaccctaaatagtaaccctgccaagctctgggcaaacaagtcctttatttgtttatcctttggcttctgcatgacagcttctgttatcctgagtagtatttgcaacatctgttccctgggccacccaaaataaaagctcatattaataatcatgtctccaaagcactttaatttataggtaccagaaattctcttaagaattcagcaacattgataattatgtattactcgaaactattaaagtccagatgccaattacataatgaataccatattttaccaaaataagctcccttatgttataacagttttaaaaacatgcctcccatgtccacacaaacaggcaggataaaacatcattccagcctgattttctccccttgcaaaaagagaggcaagatcgtcttctccaactgtgccagcagcttaaaggtactcagtgaaaacctactggaacatatgcagcactctttaattttgctatccactgttttacttaacctgtaaggtctccctctcattgcaacaggaggtgaagctgactttctggcctttattttggggacacacacagtcagtatcttggtaaggtggaatgccacagtactctcacaggcaggaggggtttgcattacaggacacttacaggcacagtgctcatgtctggaagatcctgactctgcactacagggcacaactgagacaaatgccatcactgcagctcagttccaatgtgccagcatttttcatagtctcttacagaaggtttatgtaaaaggactttgaagactataaaatagtacagagacaacataacactgctaattacaataataagttcttcagaacagccaaaagacatttttctttcttacacctaagttatattgctcatatcagagtatctgctcactttttctttccctagattctatgggaacacagaacacatcatctttcatatgtaagagaagtgcatttgttcctcgagggaaatcactctggttcctttcaggtttcacatgctaaccattcatctaatctttactactttctccttggctttactgctctttagtaataaaactgagaataggacaaagtaatcagatgagatctctaaatcatagttcccgtttacttttctcatatctctgcttatcaaaacagcattttctcctaacaatatatgatgctgaacctcataaaattcctcacagtaaaatcacctgtggggatttcctgccctctttgtagctggccccatttgattttggtccccagagtcatctgttgttatacattctcactgcactgcatgctacttgtccatgtattcctattccctgcctacggattctggaagcacagaagaggaagggctatcttctgggcacacacgctgaagcaggatggtgactttgaagagaactgggagaagcaatggcacagtgctgggggacagcttgtcgctcatcacattcagggtacccaggcccctgtcgccagggcagagaagggcagcacctagtatcaccactgcccattcatgttacatgatgcataagacaatgaaaaacaatcccttacacacaactagttacagatccatcatgagaatgtgatgagaacaacagacatcgtaagtttcaagtaaagccttgatcatggcaactgctatcaaaagccacaaatgtgatcaaagccatgactgacaaaaacagttaatttgatttctgaacctatgaaagcttggaaaggcatgcagagtcttctggaagaaaacaagggttgaaaaactatgatttggaaaaatctttccttatagtagaaagattcacaacctgccaaagctgccagttttgacaactgcttgttcctttctattttgtgaagcactgactccaccaaggagaactgctcaaagagtgtaataaacttctgttggagcacatggaatgaggcatgtgtgccatccttgggtccaacacaggagtgaggattttcctgcattcttcattattttcctgatctctatctcctcatacaggtggatttcaactcatttacataccagttattccctatttcaggaccatttcttacagttccctggctacagccctggtctcagccaccatcatctatggcactgcactgcatgttctccagcagccagaggggcctttcagaagcataaattatgttatgtcacaatcttgcaggcacacagggaggtagctggtgtccttcctttggtctgcagggccctgagcaacctggccccggcctgccccctgcctcctcccctctcacgctccctctcactccatctactccaccacattggccatcatcttgtccttccttaaacaagccacttttcttttaccttttctcccatcagggcttttgtatctgctgctctttctaccaggaatgcccttcccttagacctccccaaggctcccccttcccttcactcagggctctgctcagaaaggccttctctgacagctgacggaaaaaactccccgtctgtccatgccaagcaacacacacccaattcaggactctttcccctttgcaaccttcactgttctcagtacttcggagtctctgaaattgttttctaggtttttaatgcctctcagtcctatgaggatgtaacctcatgagggcagggaccttgtctacatagttcgccactatattctcacagtagaagctcgatagttatttattagatggaagaaaaggaggtaaggagagaggggagaagaaggagtgaagaaggaaaggagggatgggaggcaagggattatctggtacttaaatacacaagaaaatccattacagaaactgctcacactcttttctatgctctattgaccatttttccgttaactattttcatcgagttctacaatttttcttttctatactttcacctaggaatctatgaattagtaaaaaacagaacagaattgcttaattttatttcctagaattttcatcaaaataaaaagattatcaaaaatatcaaaaaactactgatacagtagtatacaaaactcagggagttttcaaaggaaaaaaacattaaaaatgatgttgataaaactatggtattcaggaacagatatttcagttgaaagcatataccagcatttctcattactgtcaatattactgacgtggaatttgtttacatcatattgtgcatcactgtaatatttccagttttaacaattgtttaacttggcaaatagtgctaagtttagaagtctgggaaagatgacattggaatctacatcatagtatcattttgatgcctgtggtttctgtacttgtgaactttctgcacaccaagattcttgagtccacccttccctcatctttgaagaacaagaattggacttggtggcctacagttcctttccgatcagacctgcctcgtgtccatggtttcctaccaactgcagacactttccaaagcccctttcctgctgattcaagggcctccagaatacaggcataggcagaggacccttctggtttcaggtaggaaaggtgccactggtctgcagggcctccaaggactgataaccaaggcagaagatcacctagggggatgctgaccacagctgggcgggcagcttgattgcacaagggtggcagtggaatgagagggaacacacaaaggacaggcttgaggagcattttaaaggcagaagtgagaggctgatgacacatggagaagaggaagaaatggaaagtgactctgaggctttctggtctgttgctgagcatcagtgaaaatacctcatcagatggagtaacgtgaggactttttttttttttttttcccgagacaagagtctcactctgtcgcccaggctggagtgcagtggcgcaatctcactgcaacctccgccttccgggttcaagcgattctcctgtctcagcctcccgagtagctgggatcacaggcaagtgccaccacacctggctaattttttgtatttttagtagagatggggtttcaccatgttaggcaggttggtctcgaactcctgacatcagatgatccacccacctcggcctcccaaagtgctggaattacagacatgagctaccgcacctggctgataactttcaaataagagcaggaaaaaaaaatctaatgcattgtttacctgtagggacattataaataaaaacatcaaacaaaaacaaagatgaaaaggaaaaaacgtagttttaatgacaggaacagattgttgactgcactatgtatttagtttctgataatttatcatttaaaataattgcttttccaaaatgaatttaaaacgtcaagttagaagcaataaaaatcagttgacagcatttcagggcaattaacaaactctcctgagcttatggtgagtattataaaacaccagttgctgcttttccacaaaactatgtttaacgtttaaaaggaaaaatccactattaagtaaaatacttattgttcaagaacattttttaaaaatataatgaaaataattgatctgtcaaagtactgggtaactaccttcttcataattcacagaaactgttacaaaagacattttgttgttaagttcgtaaaaacattaaataaatgcaagccttaacattttaattatgttgaaaaacagaaacatctgttttacaatactaattaatttgatataaacttaccatgtctttttattcattgtaagctccattatcatgcgcctaaaaataatcaaaacagctttacaagcatcaacttgttctttcaagagcacaggaacttcagcacatggttccaacaaaaagatgtttgcagagttcgtcaaaaataccttaaaatcaacaactttacattagaaaatataactgaacataaacatttgaataaattttgcttacagatattaatttcactctaccaatgaaatcatttttcagttatttccaaaagattctatttcaataaggcaagtggtaccaacacatattcaaaatttttttttggttcaccttttagaatcacttaaatacagagacacctgaaaagcctttccctaggggaaaagaaaaaatcactattacatattaattgcaactacagaaattttatgagtcagaaaagcttttgaagacttttcaacaacccctcaacaaaaaaaggaaaacaagggaaaaaagtaggatcgttgcatatgagtgagaaactgtagagggggaatgggaggagtagaggatagatggccagacagtggtcagacagaactatgtgattcttattgagtctcccagcacatgaactccttgctgacagaagcatggacagcaccactcaacaggggtcagaacctcaaggagctgtgatgtgtccagaaacagacgaagccatcgacatcacacgccttccaggaggctatttttttttaatatgaaagatatattatgcagtagcatacaaaatctaagtgaattcttaagattaaaagctgagatttcaaaaacaattcagattatcagccaactactctaccctctgcctcagacctttagcatacaagttcactgttctctaccatcaggggtatctcagcagaaaaatgtgagaagcactgatccaggatatcatatactattactgctttgagtcactacagcaaaataacggtgtgttaccatttacacagttgacaccagtgtcccatcatctgcagatattctgagttgtcaatttggtacgaggacagacctgctctatctacctagaggtatattgcctcttaggtctcctttgtgttcaataacacaaactcaaagcatgacggagcttctctagctcatttataagtaaaattttttaaagtattgtatcaaaataaatgtacaatctgacgaaattaaaattaacatcaaaagtcaagtggatgaactaaaatattcacagcctttaaagttatcttaggtaagattaaaacgtattatgtcccaattttctaagaaaaatcactaaataagcactataatatagttgatgatgatgataacttcagtcatgaagaatttactagccttcgagtaagaaaaacaaaaacaaagagctttttgattacagcaattttagtggttctgtttttgaaagtagtatgccacagatgatatattgcaacacagatccttttaattcaatgtatttggcttcttgaatatgaattaaaaactttttgcacattcccatgtaaggagtctttatatacttttactttttacaaaacatcaaaggtactgcatgagtatttcttattaatgtgctggtatcagttaaggtaaaaataaaccaaattagtatgtccagagtacatttgtcaaaagcaactatagaaaactactatctcttgaacatctgagacacagtcggagaaaagaaagaaaattactgtcttatcaaacctccatttggcccctttttcttaataaacaaagtaaaggactaaggtattagatataagaacaaaaccaactatttaaatccaaagtaaatcttttttttaactgtagcactatatataataaaatagaaattgttttttctcagttcaggcaaggacagtaagtcctcatttaacgtcatcaataggttgttggaaatgatgactttaagcaagatataaaaaaattttttttctcatgaacattatgatgaaatgatgttgaatcaaaccatgttactcaaagacctgctgtactcatttcatttaaagtcgccatttccaagaacccactgatgacattagtgaggacctactgtaaatgtaactcaacctttcagaaaataaaaagcactcttttgaaccaaggggatcactggcacctgcaaccaccacaggctgttgctggagatccccttagctaaaagatggagctactgagggacaaagggcaaggactcctgcaagtgtttctctgatggggacgcaggtcatacttatgagcagcaccaaaagtctttaaagatgcacatgtgaaatcatctcaacttttttaagttaacttcaaaattatgtgtaggttttcaatgaaaagtgagaaaattcatgagtatggtatattaaactgctaattcacttgaaaaaaaaaaggataccacgaaaatgaatcctatcaagaaacagatgacagaaaattagaaaaatgcatgtcattcccagatgttccccagactccacacctggcctctacatgagaggcctaagtgacacatctccaaatgtggatgaagggtggcgggcgagggggcagtgagcagggaatgagaggcaccctgtattttcacttactcttcaagctacatgagatctgagaggaaatctcccaattcccatttttgaggtaaaatcctgagctctggggaggttaagtaatgttccaaagttgctctttcaaatgttcccaaatggagtcagttctatttcatatattcattcaaatctaaaaactacatcagtcattgttctttgtaaacacagccaattttaagaggaatattacttataagattttataattgccaagcttgtcttgcaaattagagcccagataacttactactcataagtgtttggaagataatttaaagatttaaatatcagccatttcatattcactatataataatctcaaaaagactgtaaccagtttttatgtcttctttgactagaaaaaaatttttgtaaattgtgggtaggaattagaaagaaaactcagaatgagaatgtaatagctaattaaattgctgtttatcgtttactgacagatggctacaaataccaccatactttatatgacattatccccaataaacaaaaagacaaaatggctccagctgtaggcggtggaggggtcttcatgtcctggccagccacatacctgcaacaaagcctggacgccggctttcacatttgtattttcctcctctgtcacacaccctctgctcattgcacttgtgaaggagtatgtgcgtccccaactggaagatcgtttatgaccagaactttcagatgaggccttcagaagataatgatccattaacagagtggaagatgcacgtgtttaacttgcatttaactataaatataattaaatatattatataaactaagttatatttagttggcatatttaattccttaaactcaccaggattcacatgaaaataggttctaggaggtagagagctccccactcaaccgtcaacacctaaaatagtgctcagcacttagtatgtgctgaaagaatgagttgtgtttgtccaatgactgagtgagcatggaatacagccctttaaaatgaatgataatttgcttacctattcatttagatctcatggtagttattaaaatgatttcaccaatattgaaaaattaaaattatggaacacagatattttaaagtgacatgcctctagtgagaaatttaaaacattttaaattaatttcataatagtatgacagaaatataaatgtcacttaagtttcttttgtttcaggagatattccactctgtcattttggatttatccaacctatagctttatctaacatggacagtggcccctccaggaggccagcactcagcgaggcttaaaggggagggacactgctgtttggttagtcctttcacaggggtaacacccagctgcttctggtacaggccactgcacaacaaaagtctacccaaacattctcaatttagtttctccaaaagatatttatttaaacaagtcaaggagaaggtagtgatttttttagtctcacaaatagacatgtaaaatatgatggcttattaaacaactctcctgcaacagtgaccaacaaagatgcaacacgcagatggccctggctagagttgcaggagatgactgccaatctagaatgggagtacagaagctactctccttggtagatcctcacagaactcagcaactcagaagcatcagatgggataaaaaagagatccacctgcctttgtcccattgacaagactcttgactgagcaagtatactttactaaaatatatttaccctcaactcaaaagacaagtgaaaaaaattacctccttgctatcagtctcggaaaatcctaatttttcagcatcttcttgggcaacatcttttctatctggctcctccatgaacacaggtttgtcctggagaatccactttctgtacacttgaactacttttcttgttacagctatctcacaggaaggcaacaaaaatgcctgaaaggaaaagagaaaactccctttaactacaaacacactcagatcagtatagggcagcatcacggacattcccaatgagcatcacccatttcactttccttggaacacacagcttataaatatactacacagggccacaaatctttgtgcacaccaaacttaccagcagcaagaaagacattctcataagagagccctaaaaaatggcgttaaaaataacttttataggccgggcgcagtggctcacgcctgtaatcctaacactttgggaggccaaggcaggcggatcatgaggtcaggagttcgggaccaacctggccaacatggtgaaaccccatctctactaaaaatacaaaaattagctgtgcgtggtggcgtgtgcctgtaatcccagctactcaggaggctgaggcaagagaatcacttgaacccaggaggtggaggttgcagtgagtcaaggtcgcaccactgcactccagcctgggcaacagagccagactcagtctccaaaaaaaaaaaaaggaagaatgaaaaaaataacttttatattctgaataatttgtctataaaaataaccaaatcaaatcatatctatagaaatattttaattggctacaaaacacaattataatgcacaacctggaccttttcccaacaaatcagaaataggttagaagggacatgctggtacagcaagtggcaaccagtcgtgcccacctcttctcagctccatgttcactgatgtcatggtgttggcctgaatcagccatggtgggagtggttctactacagaagtcagcatctgttacaaatcaggactttgtttctttttttttttttccttttctttgcttttgtccttcttcctttcccttccttccttccttttttgttattattatttttttgatatcatatatatcaggtttctaatatatcaggttactaatgagttcagctatcaatgttaacaagagcctctggcaaagttgtagcattgtgcatatttataagaactttttaacattaaggaattcccttatacatctccatacaacaattttgatttaatgtgagaagattccaataatgttaaacaatttaaaggagaaatgcatttgcttttcgcttatcagttttaaggactatttctatatttgaggggaacaagagggagaggttccccatactcagatgctttaatgtcacagatgaggataccgaggcttacagcaccagaggtattcttccaaggttacaaagttagccacaaatccaggtcttggtctcaagttgctggcacttgttttaatactgcccttaaggttcatgccacaggatccagttacaggcagaactcactttaacaaagcttcatgcaatatatcaatatcgagataactgtggtatcaaaagccaaagtaatgggatttaaaaatgaaataactcaaaaactcagtgtatatgagatggacagaatggacatagctgaagagaaaactggaagaaaaatcagaagaaaatatctagaatgaactatgaagagataaaagaatggataaatcagaagagaggataagaaagagaaaatacaatgaataggttatccaatgaatgactggagatgcagaaaaaaacaggaaaaaaaaagatgggggaaagaaacaatatttgaggaaagagtggctgagaatttagccaaaatgggtgaaatatatcaatccttagatttaagaatcacaaagaaaaacaaggataaatgtgaagtatattacaggtaaaactgctgaaaaccaaagataatcagaaaaatcttaaaagcagccagaagaaaaaagatgtatttcctccaaaggagcaaccacgtgactttcgatgacttctcaaagaaataatggaagccaagaaacaatgcaacaaaagattcatgtgcagagggctgccaatttagaatttgacacccagaaataaaacacttctaaaatgaaagcaaaatacagacattttcagatgagaaaatttgctaccaggagacctgagctaagggaaatattaaaacttatcctttagatagaagggaaattttccctggtcagagatttgggaagcaataaaatgcaataaaaagagaatgtggataaatctaaatgaacaaaacatatatatgaaaatatatatgaataaaaagaataaaactggatgaaacaaaccttacagtggttctgaaagggataatatctacatattacatattcataataataacaatggcatataaactgaggagtaaatagagctaacatgtgtactgagggtaaaagttgaaattaatgctagcatttatgttaggaatgcatgtgttaactattaaagtaactacaaatgaccgtaaaactaatttaatttgagaagaaaaatgggatattaaaaacaatgagcttgaaggtccaatacaactagaaagtaagaagacagcagactaaaacctaacagcagttgctatgttaaacgtaatgaataatgatccaatcaaaagacaaagattgtaagatttaatttaaaaatctgtttaaaagacttcgctgcaatttataagaagacatccaaaacatatggacgggggaggctgaaagtaaagagttagcgaaagatgtaccatacaaacactagccaaaagaaaactggtagagttatatcaaaaatagacaagatagactttgcgcccctcctccagaaaaccattactagagatgaagacagaaacttcttaatgacagcattcaattcaaaggaatataaactaattctaagtctgtattgcaactaataattttgccaaaaatagagcaaaaactgataggctttcaaaaaaaaaaaaaaaacaaatccacaatcagagtaggatactcttccaaaagtggtagaacactaagcaaaaaaataatgcagccaggggagatgggaaccttctcaccagatcctccaggtctcaacctctcacagctctcacctctctgtctctctgaggtgcattcaggataatttcttcagatttgtcatccagctcattctctccttagctgcatctaatctacaattaaacttatccatttaggttttcttttaatattccagttattacatgtctttttaatgtctggaagttctattttcttcctaatctgcattcgtcatctattttggtgtcttttatttctttatttctttaaatatgttaaacctatttaccctaaagtctcaaattatacaactgaagtccttgtgagattgtcctgtttcttctgatttttatgtctagaaaagttttgactcacaaattcccaaggggaaaaaaatgacccaagatcattatacccagctaagctgctctttacacctaaaggaaaaagacgctggacgcggtagctcaggcctgtgatcctagcaatttggaacaccaaggcgggtggatcacctgaggtcaggagttcgagaccagcttggccaacatggcgaaaccccgtctctactaaaaatacaaaaattagctgggtgtggtgatgcatgcctgtaatcccagctatttgggaggctgaggaagaagaatcacttgaacccgggaggtggaggttgcaatgagccaagatcgcaccactgcactccagcctgtgtgatgggagcgagactccatctccaaaaaaaaaaaaaaaaaaaaagaaaggcaaaagaaaaaccttccccatcataaaaggacttaaggcataagcgttccaggacatcttcctgaaaacactcaatgacaaaacaaggccaagcaagaaaaattaagtattttagaactatggaacaggatgaattaatctgtgtaaatacagaatcaagactaaacaactctgtacattaggattctgaaatcaactgccaatgatgctatatttataatataaatgtataataagatgaaattagtaactagagggggctaaagaaaatacatggctgctaatttattcatatttcatagcaggaaacccatagtgctatctaaaattaccatgtgtagttcaaaagtgattctaacacctcaacgttattataatttttttttagtttagacaaatctttcagcaattaatacttcttatggtaaagaaatattcattggattttaaacaattccttcacttttcctttactgtcttttcttctgttaaattcaagtaaaattcagaattttcattaattaagaatgaatgaatgaagaattaaggattccattgtcatagttactccgtcagtccccatccccaccccaggcacttttccatacctccccttgtgcctgccttaatctcaactgacgtctgtctggttccaccttcacctgtctctacccatgcctccctccctcttgcttttctgcctgcctgcctatttctgtctgcctattggtctatacctgcttgcttatttccatctctgccagctggcctatctgcacccacctgtttgttcttctacacctgcctgccagtttgctgatgtctatcagttcacctgtacacccccctgtctctctaccagcctgctttctgtctgtttataatcctttcttacccatctcctctctgctggtgtctcatctatgtagctagccaggccccagccatatatacacatatagaaagaccagactttcttctaacattaatggtggtgtttcgagggatttgcttttgctttctcctctataattacatatacagagagactttgtttatctaatgaacatagattttttaataaaaataaagctgtttaaaataaaatcaaccaataaaacaacctaatgaacaaacatcctttagagcagtgcttcaaacttttcagatcatagcctaagtaagacactttaccaaaggatatatgcatttgtatatatagtattgtacacacataaataaattagaagtttcacaaagaaatagtaatccttacaacttgaactacactgtgaaatatttgttctattctattttattctgtttcattgtttaaaaaaaatactagttttgactcactaagttggtttcatgacctacgaataggtcacaacaggtagtctgaaaaacgccaatgagaagacgagtttacagtgaagtgacccagtgaccaggactgcctacacgaagcattctaccactgcctggccttcctgctggggatggcagcagatgagggataccctgagccttgtcctacttcagttactgtctatttccaccacccacattcaactcactgaactacccagtccaaggtgacccacaccaggtggttctttagcctctgtcatgagcctctctgccccaatagctcaccagcatttattcccaagtcactcatggacatctgatctaccatctcacactgttctctgcagcatacacacacaccttatctctccactgagaatgtgcacttcttgaacatccattttaaactataataaccgttaggcttaaacatctgtgaatcttaatttaaagttgaaaaaacatagttattttgaaagaagtcacattttgttttccataaaagagaaattcatcattgaccaacagagcaataaaatgcaattgtaaaacccattcctcttttcccaaatgtttctatttcagtattttaacaacacataatacttagattttaaacttcacatacacagttactctttcaaattagatctggttaagaaaaattataaaatgtaaatgtttttaagcttcatgacactaagatgtctcataacttcagtcatatgtagtctatagtcacctcaatgatcaaaactacttcaaaattgaatttagattgggtttaatatttagactgaatttagaatttagagcacactattgccaggggtaggatgccaataacagatacagtcagaattatttgtatgataaattaacaattacacaataaaggtaaaaccacaacaatatagcatttatctgttgtctaagatctaaaagccttgctaatgtcatcttatctgatatgaagtattttcattcaagcatttaaaaatgttactatagatcagagtcagcaaaccatccagcctgctgcctatttttgtaaataaaatttttctagaacgcagccatcctcacttgttacatgtatctctggctgctttcttgctaccatagcagagtttagcccctgtgacagagacgtacgatccacgaggcctaaaatatttactagttggccttttgctttaaaaagtgtgctgacccctgctatagatgatacactccaggaccttgactatttcaaatcaatagttgctatggacctttcacatgtacaacaggagcatgaatatgacaacattaatgtagggaatggggtagattttaaaatcgtggactattacgataaaaagaaaagttgtggcagtatgatgtgtgcagtactacctagaaagggatgacacagaaggatgggagctccaaggagagggctgctaaccacagtcaaagaaaatggagaggaaaggagtgagcaaaactcctgtgtgacttgtccagtgactgtcataggaggagagggagatggggaacctaggatcattaaaattaagatgcaaacatgaatacaggtccctttgaagaagcagtcaagtcaggagaagaagttgatattaggggaaaaaatcagcccggctttggtcttgttatcattaagatactacaggaacatcagattggatggcacgtgggcattttaaaaggcaagtgtaggaggcacccagtgccaccttgtctacattgttcagtgacaatgtagacactgagagtctacacctggtttacccagtcattctgcctgattttggccatgtgattagttaggtctaaaagccctctcagtaaacttgtgccctgtcttccctgagacagacatctcactctcatgttggtgaatcatgatcccgagagggcacactttctgtgcagcagagggagggcccttgaagctgtgctcaggtgtaaccggcctctgtagcattgcattatgctttccggctcctggtgtggtatatccgctgccagtaacaaatctttcatgagtataaaaaatttgtttaatgaaattaatgtttttatttacaagtgaggtccagacaaaaggcttgactgggagtcatatgccacagtggttgctggcactggacaggcagtaaaggccccaaggaggcaagtgtagaattacagcagagacttgagccctgaatcttggttaacacctgtaatttggggtgaaacaaaaagaggggccaagacatgaaacagagaagacacagagagtgagaagaaccaaggcagtgccgggccacagaaccagaaaaaaatattttataagtggaatgttaattgcagactaaacaaacattttcttaagtaaaattttttcttcattaaaatgaaaatatggtaaaatctctacactgctatagattaggttgtgactttgtttttggttgattttttgtaatgaaagtcccagaagtgagagggccaaacattcactatctcaaaaacttgcctcaccataagaagttctctgtggtgcattcccgtcattcatatgtctaagactcttcttctcctcctcacctacaactggactctgccattcaagggcttaacctacttttcaggtctatggacaaaacaactattccacctcatatacacatacccaccaataggccacattccctgttttcaagagcaccagtacctagagtcaagtggcactggccacacgccacactccagacctgtgggagctctgtttgctgtgttgaaggctagtactgagtttctccacagcagcactactgacacattgagccagatagttctttgtcatggtgggggtgggggccattctgggcattgcaggatatttaacaacatccctggctgcgacccactaagatgccagtagcaccccctccccagttgtgatgaccaaaactgtttccagacattgctaatgtcccctagggagtagcatcaaacccagttgcaaacctctgatgtcactcacggccactaaccgtagcctgggcttctgacctcttctgtctccttcctttgctcacacctcttttcgtgtcttggcctctgctcctttctttccttttattccccttgccacctacctttttctcttgtgccataaataattctatcatattgtgagtgccacacgcctctgcagagtttttgcagaaacctccagctcctcagagagctccgtgaggctctgggaagaagactggactcttctttgctatgttcatttgttgctgggtattcaggaacggctttcttcccacctaactctgggtttactttgttataaaaacatgaaagtatttgtctcatgattttgctcaaatatagaattttccctccttgtgtaaatattttgcaacaacaaaatttaaaaatcacaacaatcctcacaaattaaaagattagagggatcgttctttattattcagttctgtaacataacccaactcaccaattctatttgttggcgtgttacaagtaaaagaacatgaaacaaaatcatttccatttcaagaacttgtaacacacacacacacacacacacacacacacacacacactaacctggtgaaatacttcattcacgaagttgacataacctcgtgttgacaagagaatccgctgtaccatttcatacaccattcggtgctcttcttcaatgctacagaggctggagttgctgagtcttcggtccgacaaggtgctgctgttagaatggcttttgtcctgctccgtgggcccaccaccatccagctcaggcgctctctcctgcacagcaccaccaccaacagtctggaagaaagtcagcacacttctcaatgatgctcacccccactcaagaacacctggcaaaacttcagtcttgccttgttttaagtaactctggttaccatcaatgtgcacagggtacagcaaaccaaaaccagcttgaagcacgataggctccagagcctgtacttaccaattttctaactaaccaacaaatccctcccaactcagctattttaagaggaaaactactaagctatttcagaaaggagggctgtgaaattttcccaatctaaaaggtttaatttgcattgtaaaaccacagaataaattaatgtgtaaaaacatttgtattatcatcacatcaggtctctacactttagcatttgctcctatggtcacagagattggaatattcaggggacttcttgcagcaacaatgctaggaggcatcatttgattcatatgactaagcggcagcttgacagtggagtgtgaagatctttaaagtgtattttatcagaagaatgctgatctgagctttatcctcagaatcttaggtcaaacataaataaatattcacaaaattttaaacatttaaaagactttaggcatccaaagaaatgaagtaattcatgcaatcactcacaaagcttaacactgatttctgctctcgtatccacatagaattaaaggtttactccaaacaaaatatacatataattttgcttcacctttgcaaactccattattacttttaagtgtcaaaaatatatagcccaaatacaactaaaatttacccactgtgagtattttttacaagaagagacaagatatgaatagtacaaaacagtaatttcagtaactaccaaggacagtttgaaaacaaaacagatatccaatagtaatctctagagaaaattaatggattatacttgtaataatttttctcttcatgccttagttactaagcctgtgtggcttatgaaaggcactgtcgcactgtaagatgtgctcacctatggaaattattttatcttttttacagatccactatcttccacaggaaaataaaactttattcattttattctttttctatctgaagcttcagcaggaatgactcaaggatgagtatggtacagaaagaagaggcccaaactaagtctcaaaaacttgcttctccacattcctaactgtaaggcaacccacgcaacgcacttggatttcacatatacacacgcatatatgttaatctgtaggacacagaggctagattaggtctaaagtctcttatggctcaataacctgtgactttttgacctataactcccattttccccacaaactaaaaaagaaaaaaaaaatatgcacatagatagcaaattaaagatgaccacaaattctttaacactccttccacagagacgtgaggcccatgtcccctccctttcatctacatggactgtatgactgctttagccagtagaatagagtggaagagacctagccactatcagacccgggcccaagaggctgacagttaacaattcccatctcttgaaacatttcactcttggagccctgagtaggcatatgagaagttcaactaccttattaaccagaaaacagaacaagaagtcccatatgagcccagctttcctttccaactgccctcatcaagtagcaggcatctgaacgaagtcatcttggaccttgcagaccaaccagtgctggtgggctgaataatgacttccccaaggatgtcctaatccccagaatctgcgaatgtgttaccttccagggcaaaagagacataacagatgtgattaagttaaggatgttgggatagaaaaattattttggattatccaaatggtcccaatataatccaagggtccttataagagggtggcaggaggataagagacaaagaaggctaagtgatgatggaaactgggagaaaaggtggtgtgatgcagggccacagccaaggaatacaggtggcttctagaagctggacatggcaagaacacaggattctcccctagaaccttgagaaggaacacagatctgccaataacttgattttggatttctgactttcagaactgtaagataataaatttgtactgtttcaagacattaagtttgtgagaatctgcaatagtggcagtaagaaactaacacaacaacttactgtgaggtatagtggcagtctctagaatggtagtggccatttctagggacagtcaactgcagggtatgatggcacagaaggtacaaatggctgtcagcccagcactctttctccctccctaccagaacctcagtcctctgtgtgcctcctcccatgcacctcaactgacttgcaggaagctgaccccatccacagtactagggaccaatctgttttgtggaggacaatcatgacatctcctggcccattcacacacccagctttttttttttttttgagacagagtctcgctcagttgcccaggctggagtgcagtggctcgatctccgctcactgcaagctccgcctcctgggtccatgcctttctcctgcctcagcctcctgagtagctgggactacaggcgcccgccaccatgcccagctaatttttttgtatttttttttcagtacagacggggtttcaccgtgttagccaggatggtctcgatctcctgacctcgtgatccgcccgcctcggcctcccaaagtgctgggattacatgtgtgagccaccgtgcccggcccctaattgattccaaagttccaacctttaagatgttaaaaaagctagatagtaaaagtagatgactcacaactgtgaagagtcaagtaaaagaaaaaatcagaagctggaagcagtggttaatttgctgttctttctacttctcatcatccagatgtacttttcaagaatgagctacttattttcaataaatacaggtgatggttttctgacctttttaaaccagagaggaaaggttacacccattaattaagacttttttgaactgagtgacaatcacttaagatgtgatgtaaatttgccaaagagcatgactgagtttcctacacataatttcatacagatttttgtctgcctgataagtgaataaaggtatctcatcatggttcagaactaactgcatttctctgactgccggtgaaatcaggggtccctgtagtctgccttctatgagctgccctttcatctccttagtctatttttcagtggggttgtttgtcttcttaccagtccatgggtactctttacatagcagagatattaactcttttaacagtcacaatgttacttcatagtctattgattggatttggccttctgtagtctttagacataaaaatctttcacttttttttttttaaataaagtcaaacctcatttcttccacggctactgggtctttctctctctctctctctttctttctttctttttctttccttcctttctttcttttctctttctctttctttcctcctttccttcctccctcccttctctttctttctctctctttcttttctttctttctttcttcttttttgaaatgggagtctcactctgttgcccagactggaatgcagtggcacaatctctgctcactccaacctccacctcccaggttcaagcgattctcctgcctcagcttcccgagtagctgggattacagacgcctaccaccacgcccagctaatttttgtattttttgtagagacggcatttcaccatgttggccaggctggtctcgaactcctgacttcaagtgatctgcctgtcttggcctcccaaagtgctgggattacaggcgagagccactgcgcccagcctactgggtcttatttctacctaaggtagtctaccacttcccaaatttagacactctcctggattttcccttctcttacagtctcgctctgtcgcccaggctggagtgcagtggcgcgatctccgctcagtgcaagctccgcctcctgggttcatgccattctccttcctcagtttcctgaatagctgggactacaggtacccgccaccacgcccggctaatttttactagagatggggtttcaccatgttagcaaggatggtctcgatctcctgacctcatgatctgcctgcctcagcttcccaaagtgctgggaatacaggtgtgagccaccgtgcccagcctacatttcttcattattttgtttttattgtagaccttaaataaatctgacatttgcttcagtatgttgtaagaggcaaggttctagccaactattccaataccattaattaatgattctttcttttaatcttgactgacatcctgtggggggatgtgtatgtgtatgaaggagagagagaaagagattgcaggattgcagatttgattagatgttcaatactaatctcagtctcattcctttgaagcaacctgtctggaaacctatactactgtctcttaattcctgaaaatcaaatgtctgtttaggtttgtatcttgatactttttcctgggactcaaagaccctttaagtttgaggcacacctttttatttttttttttcagttcagataaactcttattatttgttcaattattctcattctcttcttcttccacccacctaatatttgtaaggtagggacctgtacttagatcttgtctactaatttctgatttcgaactctaagtttttagtcactgtcatgggatcttttttcagaaaactaatttttttcccagcaataatcattatcattttcattttatttgctaattttttaaactaagacatttaaaggtttcttaaaactttctttcagcaagtctttcattgttcttactgtaactgcacctccctcagatcttaaaaataagttctcctctaactcttcagtgacttctccccagtggagccgcatgctctagactgtttggtgttcctccatcaaggttcctaataaccttgaagcacaagagccacttatctgcctcctcaggtctgtgcattctttcagctcaggcctaggtcggagttctgagacttctagggcatcggcaaatctgcagtcagtggaccagacttcctatccctgttcttggggacaataaacaaaagagcacacaacaccatgatcccttagcgaagtggctgctctctgacctccacaaatggtagtgctccaccaagtccctaagtaactcagcctgttgggaaagaccccaattgtgtatggctgaccaaggccaagagagaaaaagcacaacaggccccacacaaggagaggtctcttctgaaggcctctgggaagaggtgggcttctcttctaggggccccaccattgctcaacagccagccccaaatcctgagctgctgatctacttccctctcctgagatgccagagggtgctcggcagcttcacaggtcctttccaggggccacttacagtttcctaagtgccttccagctactggggcttggtgaaagcaagacaggcctctgttctcatgctcagaggccactggtactcaagtgaggagaatgaggaggagccaggagtgtgcacacaacagctatcttctcaaaatggctcccgagattgcatcatcatggcagtcccaacaatgcacagcaagtgattcaaactcacaactccctctgaaaccttggcattacagacagggtaggccaataaaatcacttacctataaccaacaacttgtaagaaccaataactctaacaatcaataactttggctatgttccagtgtattttattacacaagcattaacagataaaaagatgatggatggcatacctggatgattttaggcaatacatcaactccatttttagtgttttgtgttgcagttagatactttttttccaaaaagaaggttacaatccacttaataaaaacaacacgagctgccatatatggaatctttgtactgtaaatgttctcattgtctcgagtggtagtaatgtacacaggctttggtctcaaatgggggatgtctggtagaagaaagaacacatgattgattaggttaataaatcataacattaagtaatccctacaaatgttttggtttccaattaaatccaatttttggttgtctaaatagcaactaagaatgaagaaccgcaattatttaaaatggcatttttttggtaggctcctttctgattccgccttgtgatctgactgagaatgagtgatgatggtgattgtttatgtatctatgatatacagctatggaaaaactaagctaacaactatttttaacaattttgataaattacatgagactataatagtaaacatcttttcacatacattatacctaatttaattttattttatagctggaacaaatgtaaaagtatatatgaacttttaaaacatcattttaggtattttaacatctaacactgcagtgattaaatccactgaactttagaggtttatatccttttccctttagatgaatccaatgaaacagaatcaatatcatctactttatatttaaaagaattaagaaagtcacatttcacctttgaggcatcaaatgctaccttttccaaagacttaataagaagtcagtttctcattctttaaattccataatcaatatgaaaattatatggtattggatttgagatactacttgccataagttcaactctctatcttaataatttttgtatatctggaatacctgtatgaggcagaaaaatgatcaacaaataacttttaatctaggaatattaacaatataccatgtttttaaaatgaatttagactacatataaaatcagaaacaaattttgaaaaaatattcacatatatatagctaaagaaatacatgtcccagtgcacctaaaagtcagtaattctacatctttcaaaactcaccaagttttggcttctctccccgtgtgtgtgtgtgtgtgtatgtgtgtgtgtgtgtgtgtgtgtgtacgcatacatagaaacacacagagtacagacaactgaatcaggtgaccatgttccccaaaaaagtaacatctcgtgtcaccacttcccctccaaaactgtttttaattattcatttgaactagttttacctgttttaaataatagggagaggaagatttgacccccacctttaccactctaagggatgcttctgtcctgtgagtcctcattgcttacagaagaaaaaaacattaggagccaaattggaaattcctttctgtttcctagtcctctggggcttactgtccatagcttgtccaatcacctaaaatttggttctccataagcacctgtcagtagtagctgctggatgcaggacccagcataaaataaaaggcatacaatggcagctgtttgccttgggctggcctccagtcactgagcaaagcctgaggtcgccataccccaccacccacaaggaaagacttcaggaaatgcagagatttttacattaaaagatgacaatgtaattataccaaaaatatcataaatacatttcaaattatttctgagtataggagccacggttcccttttactgctgtaagctgaggtatatcttagttggtacaaataattaaaatcacttattaagaaactttaaacatttaataataaagttaccattcaatacaaaaataaaatgactattttactttaaaataatcaaaggtcactttgaaagagactgcatagctttcctttggatatcctctatacacggctccaacagtacttaccaagtacaggtttgtagatgtttgttaacttagtaaatgatggaaataaatgaggaagataatactttcgaaacaatgtaaaaagaaatttaaaaccagtatcttgattctccttattcttccactccaagctcgcagcctttggataatatgtggaaaagaacatatgtatatttatatttcaaattaacatatactaaactgaagtgttgttatgttactaaaattcctaacctaaatgtaaaaaatgacaaataatattgacaatcatgtaatgaaataataacaaagctcaaaagatggcaggaatgaatacttcaaaacaaaacagtaactatgttaaaaacagcatttttacttagaaccaaattgctcaatgatatcgtatcttttataacgtgctgtaatgtatcatgcccatattttttctctacgttttttgtaattatctaacattccttgtgcctttaaaacatttagtcacaaacaatcaggtgtttttttctaaactcagaaaaaggccatttataataaatagaaattaaagaaacaatccctctcaagaatttcaaccaatgttacctacatgtaaaaccaatatcaaaaggcaaaagccatggaatcttggaaaatgcattctccgtattaaaaaaattcaaaggctacgataaaccagacatgccagtccactatggattaagtttaaatgtttcattgtgttgagataatatcctccccctcaaaaacccatcagtgtttgcatagtgggagcactccaaaactgctcaatagctgggaccgcccctcaggagccaggaggacagcctggttacacaagtgcagtcacccccaacatgacttagggaaacacagcccttagataagacctgttggtggttcttaatgcttgttagaccacagagcactctaaagcagggcttcccaacttccttcctgacatgcccacttagaaaatgaaatttgtgcagcacctgaggtaaagggatgagatgctttggctaccgcaggggcagcggggttcagcatccataacctgccaaaagctgtgctctgagaactcatctcaatcgacagaagagaaggcagaagggaggcacagatatgcacctaaaactctgcacacaattaggaagttcacagtctgcatgcaaacctctatcctatatcaattccatccgccttatctgaggtcacacaactcattagtgacacacctagaatgagaacccaaggcccccaacacaagttctggatactctgttgattttccaggataaactgaatgtccaaacacttctgaacagctggcatttgagatgcatctagaatgggccattagagttcaaatgtggagtttccagaatatgaaagcatgccccagtcaggttctcaggattgtgaagtcctgtgtttctgttgctggctaaaggcaaaggggcaaggaaaggggacaaaattgctaagtattcagaaagagcagccaagtactgaatcttgagagacagcagagaaaagcacagttccctaaagaaaactagaaaggagtgaaaggaagggaggagaattgccagagaaaatatcagaagaggagagaatctcatgaaggaggggtagttaaatcccctcgaagaatgaggagagcaaaacctgaagtgtgccctccttctgggctgaccctagaacccttgtggtttggggcttgccactttagcagtgacagggcagaaggcagctaacagtgggtgtcaaaagaacatgaatgaggatgtgaactcagtagagattattacttcaacaactcggttgtgaaggggaagacagatactggacaatacccaggatgaactcaaggacaagagaagtatttgctgagaaaaaagaatcagtacattttattctaactattattcagaaatctagaccaggagtcacaaatctcctattaaaatcataaaccagttacttcagttctgtaggcaattggtgcatatgagaaaaataatacatgacataaaggaggcctgtgccaatggcatgaggagattgctccatgtgcttcccttcagatcccctggtctgctctgcctattcctgtccacctgttcagcctctgggcccgcctcctccttcaacctgtcttgcaagcatagagattaggggtaggaaaggagtaaagagagaaaaatggtttaaacacactcacaaaatagtacatacagctggtcttgctgaagtgacctaaaaaatggtacacactctgcatttgctgaaatatcacataaaatcacctcaaagaaaaagaaagaggaaaaatatagatacacagagggaaaagaggcaatatttcctcttcctgctgagaataaacccatcactgaaatagtcataatttttctctgacctgaataaccatatacttcaacagtatttgaagaaaaaagcaggtttggtcctcagcaatcttctcccctgatatggctggtaggagtggagtgatttcttctggatatatctttactgaaaggacagaaaatgatgacagctcattcaccaaagttaaattttaaacagaatttagggttttaaaaatggtctctattaaaatacatctctccatccactgaagcagctcacactgaggagcacactccaaggcagtgtgcataaagggcctggaaacacagcccagatgcccacgaagcgccttctcctgctgcaccattctttcccgttcaaattctgctttggtcagcccaagatcaaatgccagtcattaagcaataacgcaatatacagtaataaatcaatggtcctaacaggcaagttccttgaaaactcacaggacacaaatgaccaccgttaatagtcccatgaggccactattgtccttccatagatgatgcaggaaaatacagtggcaaaataagatcctggtgagcagatgaatgtccacttacgaacaacagtgataagaacaataaaaacaatagctttggatggtggagtttaatctcattaacagccagaaaaccagtccagacttcccatgtgtctctacttcgtgctactgccaacatctgtcccctcctattcctgcttccatcacttcagtacatttctcctgttttcatttcatataaaataagctccaagtcttttgattctaaggtatgtaagaatctacagtgaatatgaaaggggaataattcctcttcagactccatcaggatttctattcaagaaaatgaaaaagtaagaattcctcaatgtaagttcaagagtaatttcaacatgggagatctgctaacataacttaccatcagctacactagggctgggattgatgagtgtctccagtgtgcaagggcccctggatgacatgactgctgggaaaccaggcaccaggcaagcaaaaatcagaacctgctcttctgcacagtttgtctgaagtgcttgaagccacagaagaaacagcctgattccttcacatcttatctaaaacaaaattaaaaacaatgaaaatgaaacacatgtatttacagaaatgcattacaatgtagcatcggtcttgagaaagaaaaactacaagttaaaggtgtgttaagtagtaaaccaaattcttcacttagtgacaaataagcaaagatgctgcaatacagcacaagagttaagagcctgggttctggagccaaagtgcctgggttcaaatgtaagcgctgccactttctagctgggacccatggagaaccacttaacttctccatgccttagtctccccatctgtaaaataaggatgataagacatttaccacaaaagactatgataaagactgagttaacatatgtaaaccaaataacacaatggctaactcccagtaagcactatgtaagtgtttcctgttaatagtatcttattctgtaaggcaacagtacccacggcctcaattatccataaaaacaatgacaaagataatctccctccaaatttacatgtgctatcactataatatgccatgttgataatgttcttgagaatcagaagatatggagctaaataacctcaatgagacagagcagctcttcttataccttatgtccctattctatttctccaacacctttgccatgctctgaattgccagcatcacgctgtaggagacatctacatagggagatgtgtcctttttctttctttacacttcaaatttatcccattcctagaattcaaaagcacatgtccctccatttctgtattcctaaataactgaaaagattatgtcaataaaaaaaaaaaagcaaaagaggttgaaaaaatgtcacatgcagctgaaagatgtagtgagctccaaatgccagcaactggagtgactgcctcatctcctttcaattaattcaaggtggtgctgactccaccagagcaagaatattgcaagtcaaacacaaagctttgccagaaaaccaaaccaaaaagtggagaaaagcctaaataaataaataaaaatattctgctttctcccaatagaagccaaaatacactaggacagacaccccagctggtgacagtactgccccattaacggggtaaattcacagtgtacttccaaacacagtcctggactccaccactgttctgcacaaacctccatgcccactcacacctgtcctcctctcccaagcaggtaaaatgagtggtaacattactattcagccatcagaccgagaggggaggggaggggaggggaggggaggggaggggagagaaggggaggggaggggaggggaggggaggggagggaagagaaggctctatgtatatcttttttctttttttgaggcaggggtcgggggatggagtttcactctgttgcccaggctggagtgcagtggcatgatctcagctcactgcaacctctgcctcccaggtggaagcaattctcctgcctcagcctcccgagtagctgagactataggcgtatgccaccatgcccggctaatttttgtatttttagtagagacggggtttcaccatgttggccaggctggtctcgaactcctgacctcaggcaatttgcctgcctcggcctcccaaagtgctggggttacaggcatgagccactgtgcctggccagctctatgtatatctaatcaaattatatttaattgaacaagagggaagtttctatgaaattctaccacaagtctccaattgttatatgttaactgtatttaagagaactaaatataaataagggtagttataaacatgagattaacaacctgataggttttaactacaagcctatttccttaaaataagagggacaaaatatagaatctacagtgacgctaggaataactcacttcgttttttttcaacatgtaagaaatagttaacatatcaagttttcagaggctgtgattgtttaagccaatgtaaaccaaccaatatattagcttattaaaggcattcgcacaacttaattaactccaagtgaattacctttcataaaatattcatcccaggctgaattttttctgccatttatgttttagggtaatcttatctcagcatcaagaagtatatgttataataaaagacatatccatttcaaaataaaccaattttaacctataaatctgccacaaataaatattcaagagtgagaccctgttgttcttttctcccacaatggctctcacaattagtaaaattaattagagacaactataattttaacaaccaggttaccaagatggacagaatcaagcatgtgagctctgaagcttagagggcgactgcacttcctttttctgatgataaaactggagcagtcagtgccttgcccatggtccctacccatacccagcagaatcagaattagaactcagaactctaaactctgaagcccaacccattttctcctaatactatttaaaatgtctctcgcaataagttatgatgtaagaacaaaaccctaacaatataatttctcaattaaaaattaaaactaagtcaagtggtttctaaagatcttttttccaaaatgccctaacattgttactttgtggcattaacaaatttaagagtaataaaaaatgtcattacacaataaaataaataccttaatagaatttccagtgtgtagaagcttctttaaagttgagcctgaaagtttaaaataatgaattataaatagagtatataaatgcatatcaaagatctattttaagaaaatatgtacttatgacaaaaatatactttttaaaaataaaaggaagaaggctgaccttcagaagcaaagcaatgtcacagagggaaagacgttttcaagataaaagtaccttaagtatgtatctcttcagaattcttttaaaacagtcaaaatgactgatattaaggtaagccaaatgcccacagtggattatgcgcatatatctcttgtcatgcataaaatggatgcttttttttttaatctctaaaggtaaaaataatgtaaaacaattgctcacaaaacatttttacaagaacattttacaaatacttagaatggcatgtttctctcctggcaatgacaaccacatttatggggtttggtccatcaataaatcctctagcagagcgctttggtcactgtcaaggaggcagaatcaaggctgactcggaactccagtcaactacaaaaactggtgctgcagcccactagaatgagaaaagcttctcttaggaggatagaacactattactaagtcttctataaatgtattcatgacctcagtatggagatggcaaccccacctaaatatcttatgtagcctctaaaacgggatcttaacctcaaaaaaggagatgatcttttaaaacagaaatatactgaaaatctgaggcaagagaactttcctctcagtcaaatttcagatcctttaagaaaaaaattacttagatcctctgatgaaaagtttgtgatagctctttaacaactggatatcaaataatatttactccaccaatgaatttcatagagctcctctaacaagagagccagtgttttggcaactgatacaagccacagctacattgataaatacatatataataactaaatgcatactctttagaaattcattagccagaaaaaaatcactggcaatccgaaggaaccttttagaacgattctactgttcataacaactaacactagggcttggaggaaactcatcatcatgactcaggctaggttctagcacttaaataactaatagtttgtgcttgagtgaatgaagcgaaagtgtctccccttccccaacttctcccttcacaaaactgtatccagtaatttttggtctagagccaacatttactaggctggctctctctgtcacagctaaggttcaagtgtccatctagcccacacctttcctcaacctggggccttgttctttgtccccatgttcatccattcttggagagtttgttctaagtcagtttaacatctacttcattacaccttatggtggctggcagagccaacagatactagacctcccaggagacctaatgataaagtctgcacagacagttctctttccagccatctggctaatccatcatcttgcaacatattcttggaaatactttctcctggtcattgtgtgtgagcattggtgcttgttagtccttccccttgttaagatgggtctggcttgtttttggtggtggtggtgcttttttttttttttttttttttttttgagacagagtcttgctctgtcgctcaggctggagtgcagtggtacgatctcggctcactgcaacctccacctcctgggttctagcaattctcctgcctcagcctcctgagtagctgggattataggtgcataccaccacgccaggctattttttgtattttagtagagatggggtttcaccgtgttagccaggctgatctcaaactcctgagctcaggcaatccacccgcctcggcctcccaaagtgctgggattacaggtgtgaaccaccgtgcccggccgttagtgttgttttttaagtatttggactacctatagatgcctataaccactgttctctacacacagaggagaaaaatacatatagaaagggcattacatgcagacatatagaacacatgacccatattggtcaatggtcccaaactttttaaaatttatctggcaatttgttacagcagcaacagaaaactaatacatatgtatttgatctagtctattctgttgtagtgaaaaactcgtttgtacatgggaagcagtacagcttagcagttataagtcagattcagaagctagactgctagggttcaaatctaggttctgcatttattaactgtaacctaagttagtaacttcatctcactatgcctgagttctctcatctgtaaaatgaggtgacaatagtacttatcagacaactgacagtgagatttaaacgagttaatacatataaatgcacagaacagtgccgggtatgtggtaagcacattttccacacaggacagggcatcagctattctctaaggaactcttttttaataataaaaaaaaaaaaaattagcaagaaaaacatgtgcagtggaggcacatagcatgaggactggtaataagtagctgagaaccttgcttggcctctgtagggctttttttttttctttttgagatggggtctcactctgtagcctaaactggagtgcagtggcgcgatctcagcttactgcaacctccgcctctagggctcaagtgattcttgttccccagcctcctgagtagctaagactacaggcatgcgccaccatgcctggctaattttttgtattttagtagacatggggtttcaccatatggtgatccgcccaccttggcctcccaaagtcctgggattacaggtgtgagccaatgcgcccagccctctgtaggtattttttaaggccttaagttcacaaagatatttctactttaacattatcaagtcatttctcattttgttttaatttttaagttcctctatatatgtcatgcctgtttggatttttaaacttcttattcaaactataattatacccaccccacctcttctgtgccttgaccatgggaataactgaaagaataagtaaataagatctaattacttgggctgattctatgaatttctaatttctattggctaacttttactacattttaaccataaatatcctttgaatgtaagtcttactacttttgaagaggcagtaaaaacgtcagggctgcaactagtgagagaagagtgtagattctgaaaaaaatttaagggatactaaaaaactcattaatcaagataaatattttcatgcaatggtttttaaaaattgcattttaaaaaatgcaaagaatccataatgaacaatattaaatttttaattactaatgttccgctgaaccatataggaaccagagggaaaagaaaaagggtatacttctgtatgtgtgtttctatgtacttttaatttttttttctcgtgcagaacattaaagtagcttaaaaatgtaaaattggatgtattaaaactcacagcattagtttaaatattttatttataacaaagaatgtattataatattactttcctggctctgaagaaagcaaattcatcaataatattttcaaaatctatttctttgcttctcattttagattgtaagaattgtcacatttgacaatttctctttgaacaagtaacaatcttttaaagatcttttaataatatttttaaggccaggagatcatacagatatttctcacctaaaactttaacattataaaatcttttcttatttagttttaattttttaaaacctccttctcaatatcacacttcaaaccaaattacacacaatgcagtacaccatcagcatcaaacaagaagcaagaaagagagaaactccctctgggctaatggtatgccaagcctgctagaagaggccagtggaatacgaacagagaacttcctggcactacaagatccacactaagcatgaggaaccagcattccactaaaaaatttgaaattaacataaattagctcaaaatggatcaaagacctaaactatagaactgctatatgaaaacataaaagatctttgtgactttgggttaggcaaacatgtgttacacatgacatcaaaagcacaatccataaaagaaaaaactgattaactggatttcttaaaaattaaaaacttcaacttttccaaagacactattaagggaatgaaaagacaagccagaaatggggagaaaatatttccaaggcatcaatctgagattttttttaatgggcaatagatttgaacttcaccaaagaagacaaagtaatggcaaataagcacataaaaagatgcttaagattattattattagtcaatgagataccactatcactaaaataaaaagactgatcataacaaatgttgaagagaacgtggagtaactggagctcttatgttgctggtaggaatataaaatggtacaaccactttggaaaacagtctagtagttaaacatacactgttacatggttcagccattccactcccaagagacaggaaaccatatgttcacacaaagacgagcataaatgtttatagtagctttacttataatagccccagatgctagaaacaatccaaatgaccatcaatacctgaataaattatggaattatgacatgtccacacaatggaatactgtactactcagaaattagaaggaatgaactattaattcatgaaataatataaataaaccctaaaataattacgccaagtgaaaaaagccaaacaaagaagagtacatacttcatgattctacttatgtaagactctagaaaacgcaagctagtctacaagggccagaaaagcagatcagtggttgcctagggactgggggatgagatgagaaaagatgggagagcgggattaccaagggggacgaggaaactttcgggggtagtacctatgttcattatcttgatggtagtaatgatttcatatatgtatacctatgtcaaaacttatcaaaatgtgcattttaaatatatgtaatttactgtgtataaattgttaaccaccccccataaatattttttttttaatataagaaaaaaagatcaggcgacctggaagtgattgggtcaaagatcaggagaatggaggatgtggtcaagacagagatcagtgtctgaagccattgaggcacagaggattgcggtgggggttgatgggtaacttggcatgaaggaaaagggctaggagagaacaaagccatgggggatggggggaaggcaagcgagcaggaggtcaaaagacatggcagcaaccaggaggtagaagatggcatgtaaaagggacagaggtttccacagagggaatggtggctgatgtctagaattggcatgggagaaaagaaagaccatgatctcacccccactcctgagggagacagaggagcttcagacaaaagtcaggtttcagatggtcagggaggtgaaagaaagaggctgaggtttcagggctattgtttaacgcaagaagaggacccccccagagggcaaaacacaaagaagtgcctgggaggggaagaagcacagagcagtaacggtaaaagcaccctgagagggcatggaaaaacaccaggtgagttggcccctaagctaccaggggcattagttccagacatctcctgctgaacatggaggcaggtggggtccctgatttcacccagcctggctgtgatgcacttctgagggagtcctgtgtgaagtgcacagggaaaccctgctctctcaggaagagtgaggtatggtatggtctgaatgaggggagcagggaaagctgccagactcaggctcccaaggaaaagttaggacccagtggggagtagggaccttgagaaatgagactggtcagaggctatgttcacatcccaggcaatgtggggccactggttagtcccaggcccaaagcctggaatacacttaaaaagcaaaaaacaaattttcagcttagttaggcctttggtttttacattatgtatataaaaaacctaggtgaacaaactagatttaataatgactcataaaaaacatatgaggtattgcacatatgtgaattttccaataactgaaccccacccctttaaacctagggattattcatttttaacattttttatataaaacatctctaatacaaaatatatccttctgcctacctgacaaataattattgagttcgggcacagcactgtacactgaatgagacaggaaacttggtttctagaggctccagagcagtaagccttcttaaagtcaacacacatataacttaagtcctgtgttgacgatgcgcagcctgcccttataccaaatatccctggtttgctgccagtgcgattctttgccattgcctcactctctatcagttctaattattgcccagaaatgagatgtcaagcagtcacctttatccaccatgatttactggcctaaaaaatgacttcagaaaaaatttgataaacaattttttctttcgtagtcagtaatagaaattgacaaatagttgagttgtatattagtgtacaatgcagagctcatgagtattgtgccaaccactcccctggtcatcttgctgtacaaacatcacttgaagaaatacctccagatggaataatgaacccatgttcatttcacattgcaaaacttacgagttcaaatatgtttcctcattcaacgatttaaagcaaggagccagccattaaaaaccaaaacaaaaaccgcagattatcccttccctttaaaagcagttttaagagaaatagaatgtctctgttttctacagacaaaataagatgacatgataagaaacagacttcaagcactgtggtggttgatgtttcaaactattttcttccttctcaggataaaatgtggctttcgagactcatagaatacagcagttgcccttattttaggtttctctgcttagagacactgtcatttgcagtgtgggacaagaagcataccgcatcagtggtgtataactacaacttcaaggttttaacccaacattttagaataccctgtcccccaccagctgcagtaacatttaattagtaagacattagtataggagtgtcctccctagtaggtaaggaatatttgctacctagaatatcagacactggttggtgagaaggcccctccttgcccaagactcagaagttttgtaaaagtcaggatgccaatgctgaggacatatttaaagcatattcctttcctttgatacctggtatttccctatagtttctaagtttctacaacaactcagtcaagacccggactgactaatggtaacagttttaaaaatccaaataaactggaaataattcaataggtacagtgaggtatatatgtatataattacaaatccataatctcttatggaccatttcaaaatccaaaagattataggaaaactgaagttcttctgtgtaagtcattagtggacagaacctaatctgaattcatatgcctgcaacacccgaataaggctatcttgtgtgtagatattccactaatggtacatattcttatcttaagctatagaaataataacttgcttagttggggccgggaggagaaggcgctgcccaggccactggaagtgttatgttaagattgtcttgatgttctaatttatttgcttcattgtacatcaacgcaccacattgtcattctaaaatctgaaaatgcctgattccaaagcacatctagtaaagatcactgtagaagcgatgtggacctgtgtcaacaccaatttccacccaatatgattattatgcaaaaatatatttgtctgaaaagagcctgtttgactttaagtatataagcatcagtaataaatgtggattattttacatgcaaatgctcatatttcaacattctgaaatattattcattctgaccactttacagcaccagcttgttctgcacaccagataaacaacacatactgctattagatggctcaggaaactcagtatttggcaatctcaattgaggagtctgaggcctccagtcattgttcttgctaagatgctgccaaactgggtaaaaagctacttgtaccagcaattttaaccagtttatgtggtattaggcagaattaaaataatactacacactgcctactagacacatagtttcacaacacaaatgcaaattaattttcacacatagtcctaataagtttattcatgctgtgaagagcctactaatcttcagacattctaaagtgctatctaaagaaaattagcatagttttcatacaaatgatataaacaaaattgaagaaggattatatgtagcacagataaaaaatactgcatgcagttatttctcattgtcagccattcctacggtaccatggagcaccacaaatccccatgatgtctctttggattataccttacatttaaatttttatttttactttaatttaaaaacacaagctgaaagtctcaattaagcagaaatgcaatggagaactctctaaaatttaaaggaaaactttctttgtgtatttgaaatatttaaagataaaggcactatcttaaagtaatgatttacacatttggttcaattgacatatacacttttttaaattaagaacatataacttcaaataattcagtttctataacagtcaattcaattttaataattgaataatcctaaatgaaatttaggatttagaattttggaatatccactaatcatgttgcattctttcaggttccacaactttgtacatattgatctcccacccagaaaaccctttccaaactgcacctgttcatctttcaaggctcagatcaaagttacctctcttgaagccttcctcaattcctctgaacagaattattcaacttttcttttttgttatcatcatacttctttcatagagacaattttgctgtaattatttttctcatctatcccctgactgggcaaaaggcctatacaatacaagaatggtgatatattcttagtttctgtcccagaactttgcacacaaatgtctctccctcaacaaatatttgaatgaatgaatgatcaaacagagttagattccatcataaggtcacactctccacaaatacaatcatctggtaagtaagaaatcttgtaggacatgctagactcttgtacggcaggggattgaaggagacactgtttaaaacggaaggcagaattcacgattgatttcccagaattactccagctgtgctgtgtatattcaagtgggatgagatgttagaggttaaaagctggacagaaaaggcagctgtggtaatttgctttatttcaagtttcctctcaatgccacatcctaaagcattcaaagagaataattttcagtcaatgatacaggcttaaagaacaagaattctcttggctgggcacggtggcttacacctataatcccagcactttgggaagccaaggcgggtggatcgcttgaggccaggagttcgagacagcctggccaacatggtgaaaccccatctctactaaaaatacaaaaaaaaaattagccgggcatggtggcgcatgcctgtaatcccagctactctggaggctgaggcaggagaatcacttgaactcgggaggcggaggttgcaatgagccgagatcacaccactgcactccagcctaggcgacagagcaagactccatctcaaaaaaaaaaaaaaaaaaaaaaaaaaaaaatacacactactgtgattcaggaggtctggctgggacctgagattctgcatctctaacaagcttctgggtgaggcttatgctgctggcctatgaactatactctaaggagcacacagaggaagagagagacatatttgtctccaaagtcagggttgaacttgtcttggttttcattaccataataccatacccttattaatattcctttctataagctatcttgatgatatcaattatataaaacattactgaaaattcaactggaagaaattcatattactaaaaaatttttaattgttcttacctatactctggtaatgccatcgaaagaaaattcgttcaggtagaaactgcagtattttctattaaaaaaagatataaagaaaataaacaacaaatgaaattacacattttcatgacaggcccatattactcactgtaggtaagttctagaagaggaaaaggaaactatgtacaataacataaatactgcacttcatgctgtattcctatgagatagtttctttcacttgccccaggcaagctttcttacctgaatgttttaaagagatcactgtcccaagtttaattccctccaaaagaaaacaagaaaaaacctaaaatgttatttttatcttaattaaataatagccatttcttaaatattaaaataaaaatttcccaaatgacagattccccaggtttcttctttttcaccatctccttcccattttcattataatcactattagtctctggacaaagaacaggattgggaagaaaagtgaaaacaaagagaatgagactgtaaacaactcagtgagacaagaaaatgaaattggtggcaagaatttcatgaaattaatggccaaaaaaactaataagttttagaattatagttaagaatatccccaaacttttacaaatttgacttttgtagattccatatatatgagatcatgtagtatcttttttttctttgagacaaagtctcactctgtcgcccaggctggtgtgcactggcgtgatttcagctcactgcaacctctgcctccacggttcaagtgattctcctgcctgagtctcccaagtagctgggattacaggtgcttgccattacactcggctaatatttgtatttttaatagagatgggggtttcaccatgttggccaggctggtctcgaactcctgacctcaggtgattcacccacctcagcctcccaaagtgcttggattacaggcgtgggccaccacgtccagccccatgcagtatctttctgtgcctggcttatttcacttggcaacaatgtcctccaggttcaaccatgttgtcacaaatcacagcatttccttttataaggctgaatagtatttcactgtgtattcataccacattttctatatccattcattcactgatggacacttaggttgtttccatatctcaactacagtgaataatgctgcaataaacatgggagtgcagatatctcttctgcatactgattttaattccttgggacataaagccagaagtgggattgctggggcatatggtaattttatttctagtttttttgaggaacttccatattattctccataacggctgcactaatttacactcccaccaacagtataccagcatttccttttctctacatcctcaccaacacttgttacctgtcatctttttgataatagtaattctaacaggtgtgagatgacatctcattgtgatcttaatttgcattttcctgatgattagtgatgtcaaacgttttttcataaacttgttggccaaatgtatctatgtattcttttgagaaagtctattcaagtcaccttatctttcaagcccataactctcaaaggtatctcatatctaatgttactacacgataattctgacaaacactcaaacacacccacatgcattccaaatcccatttagtgaaaaatacctacacaccagacaacagacttcactcttgaaaaataaaataaatataaataaaatatgtaatccttccaagatttcatgaatagtgggcaagagagatgataaagaaaagaatatcagttagcaaaaaaaaattttttaaataaaaaaaaaaaccttgacagacgtttgcacgaaatattacagacgtaagggggaaagagcttcacctcagcaggggcttcatggaatgcttcctggaaatgaggacacttgagctgagacttagaagatgaattaaattcgcctagtggatagggacagaaggaatgccatgggagaatgttagaaggccaacacagcttggtgccttacaggaaccacagcagcaggagggtcagtttggctggtaggcagtgagaaggggaggagatgggcctggagaggcaggcgaggctgggggcttaatgtcctcatgggagcagtgtggtccctgaatgggttccagctggaggtgaactggaggcagctgagaggggaggtagacacagtcactaaagagaggcaatggtagcatttcagaggagaaataagaaggcctggatcaaggccggccaggtaaagagaacatataatagtgatatgcaggagataaaattgtcaggataagtgggtagaggggctgtagtaaatggaggtctccatggctcccagtggctttgtagatggcaacacctttatccaagagatcaaatccagatgcaatcttagacccgaggagaataagctgtcaagtttgattctggacatcctgccatttgaggtgtcaagggatgaccttactggaaatgttcttctaggcaaatgtgtaaatgggtctggagtacagaggcaggatttggacggtaacagatatgggcagcagctgaagctgtgtgtacatgagagctctcttttgagagagtttaaaatacgacaagatgaagctctggaggtatccgtgagctgagggagctctgctaagaaggtaaaatgaaggtaaagcaaaagccagaggctaatgtgctcgaatccaaggagaaatctttgatatgccagctatttgtatgcttacttattataaagattagaaacatttacgagtatttatatgcacaactagttctaaaaagttaaacatattagaaaatgtggggaaattgatgtcacataacagaatgacttcaatattaaataaagtgagctcaatattaatctcttgccttgagaacacacaacctttgtaagccagacaccaaatgccaggcatgacagatccatctataaattgtacagaagtaaactggctgtttcaagggaaaaaaaatcaaaataagtcttccccttgcaatatgctctaacattaattttagatggataacacaaaaaaggagctaaatataaaaactgggttgttatgttatgtcaagttacattacattaaaagggaatcagaataagtaaaacagctctctacagaatatcttaataagaacccacgtgagcattgtcttaccaacagaacctaaactcaaacatccccatgggcacataggatcaagaacccaagctggtttacaacctacaggaaaaaatcacaagcaaagagattagaacaagaaatgcaaagactctggaactgagaataagaatgagggtctcaggagttaggctgccaggccaaatgagcaactctagggccacaaacacaatctggagatggcctggggatcaccagatgcgagagatgaagacaagcctgcacctgcatctaagttagatcctctggttctttaactcaaactttctcttaacagaaaaatttactatagaccccaatttggtatctttgataaaaaattaatgataatagcaaggtgagttttctggaaaacatgctgcaatggaggagataggagtacaaatggcctactgaggactaacacctgtgaaagggaaaagacggcagcaagattagacaggggagcctcagaccacgaggcagagctgacaaatctctgccagcctagcggaagctccagagcaaagatgagaggagtccagtgtgaccagaaatggcgaggcccttgtactactgcctctggcagttactggcttggggccatgatgcaaagagtatgaccaaggatggaaagccgaaggtgtgaagagctggaaaccatcagctaacgccacttttgtagctgggcagcacattctttcttgaaggggaatatgtacagtccatctctatgtgtgccacaataatcttcaaattattaattagaatattctcatcacattggaaagctgaagttctaagagacgggccccctacttgagagacatggcttctctactggcagtttctcaacagctggctgctacctcacgttgatggaaacctggtcccagtgagttctccccatgctttctgtgcttccttccatgcagttcacagtgcctgggcaaacggcacagcagtaacttggtgtcctattatctcacgcattctcctttaagggacctggcagcccagctacatcccaggatcatattctgatcccatcttgccacttaaacatttcatataggaaatgctgagaaaagtaaagattcagaatagatcttagattagatgaatgcttgacatacccactgttcttcaggtctttaatttggtcaggaaactaatttggcagtgaaaatcatgctttttagttttccaaaatacatattggtcttcttgatttcattttcttttgttagcacacaacaaagaaaaacacagaatacagcaagacgatgtgtatctacatgcttagatactgtcagtctgccacaaaagtaatttccagcttattctgaggtcaagcctatcattatcaccacttctgggtaagttttcagattcacaaaatggatggactttaaaaacactcaaaaaggcttggatatgaaatgcatgcccagtatctgagctactaagaatattcccaaatagacaaaatcttacacaacaagtcaaaggctgaaacattacccacactgatgctttttgtacccaaatattgcaagagccattgtttaaagtctatgaggtcaataaaaataaagcccaacacaactatctatgtccaaatgctaagcctgtccctcagaaagccctagatgaaggctacctttactgggacaaatacaatctggcatttcttctactgcagccaatattctaagctatactgctgtgaatgccacataagctactgacatcttgtttgtagtttcactggaaagtaaaataagaaaaaaaaatcaagaaagccacacagtgtgaataaatattacttttctgaaaaacacacagctctatttaatgctcagtgctcagctgcatctatatggtaatccattatagtacactcgaaatcgaaattaggtattactactgatcagcacatcagggaatctgtcattcttttaactgattatccatagttcttttttcttcagaacctactgcatgaccaggaataatgtgaaatgtaagctggagtctacacaagatgctatagtctactttataactgctggtcttctgatttgtgtgggaaatatttttaaattattatcagatgactgcaacatgtcccagtggattcacacttgatttcaattccacttagaaagctaggacagtgaagaatgaagaaaatactacatactaactcatgggaaggtaatcaactacaataatgaccaactaacatgttacatctgaaagcagagtgtggggagcaacccttccccaaactagctgcaggacagaagagctctgggtaaagaaaatgctgaccgagaagaaaacagatttggtttaaaagaacagaggtcttagttacttgaccttttgaataataaatatgcagaaaacttatgatgagaactggactgttcggtttaaagaaaacattctgtgaatgcctgtgctacaagtatagtctgatttcagagggacccacgtgcatagcagcccagctgcatagatgcttccagggagacccatagagagggcaacttgatcatttgctgtcttaggcctggacactcatctcttactacaatgactcaactctttcatgaagacagaatatttgccttgaacactttctcattaacattataacaaaatgttatttgaggacctgctatacgtttaaagttaaaagaaagttattctagaactgaaagtccatcagccacatacctcccttcttcaatatatcctacacaattcatattccagaaaatatacagattaatcaaaataatccgaaaacaagggtgtggggttctaaacactgtgacagtgagctatatttacataattggagttaatatgactataaaaaagagtatattcctaaaacaactaacataagacaacatcctaaaaatattataataaaataatctgaatggcaacagcagcagcgagaggatgaacaagttatacaccttgaaagatgatgacactggggaccatgctcagaatgaagaaaacagcacacagaaagatggagagaaggaaaaaacagaacaagacaagaatcagagcagcagcaagaggaaagctattgtccctggaccagcagagcatcccctacagtacaactacactttctggtattccaggagaacccctagccatctcaccagcttacagagctacaaagagaatatcaaacagattggctgggtgcagtggctcatgcctgtaatcctagcactttgggaggctgaggtgggctgaatactttgaggccagaagttcgagaccagcctggccaacgtggtgaaacccagtctctactaaaaatacaaaaattagccgggggccgtgatggcgcacacctgtaatttcagctactctcacttaagcctgggaggcggaggttgcggtaagctgatattgcaccaccgcactccagcctgggcaacagagcaagactctgtcttggaaaaaaaaaaaaaaagactatcaaacatattgatacctttgcctctgtgagttctcaatgatttaatggagccctgacagttcactcatgcctgtatttatatcgtgatgtttatttaccttcctggtaacctatttaaaattctggtttccttagctgactgacctgtctgagagatcagatttgttcattcttaggtttctccctaaacattcctagttaacatgtaggtatcaacaaatatgagaattgcagagttgatcggaagagcataatacaaaagtacaggcctgttttttttttttatttaagtagacatttatgcagtccttattaagctcaaagtgccatggagaatacaaaagcttatagtacctggcatctaacctcatgaagtttgacagtaaagtgaaaagtaaagcttgaaagttttgtatttaagaacctcccattaaggttttggctgtgttcacgatcatgcataaaatacttttttcctgtgttcagaaggaaaatgaaatccctaataattgcttttgtgggtactgacagtagatagagcctagactatgtctcacctccctcccaggtgacttggtttgtgggtaccccaagaatctgtctgcaactaacaccagtcttgttgaacaaaggttattatgtacctcctgtgtgctgtacagttgatctttaggcagaaccaaatgcagggtctgtcattttcttgaaattattgaggtattagccctgtttaaatgtgtaaaaaagaaaagaatactctaataggtaacattacaataaactactaaagagggaaaaataatataaaattaataataatctgggtataaactgcttaaaatagttgagaagaagtacaaaagacatatggagttaaagtaaaagtatagggctatcatcgaattttgctttatttatttttttttgagacagagcctcgctctgtttcccaggctggagagcaatggcgcaatcttggctcactgcaacctccaccacccaggctcaagtgattcttgtgcctcagcctcctgagtagctgggattacaggcgtgtgccaccacatccagctaatttttgtatcttttagtagagacagggtttctccatgttggtcaggctggtcttgaactcttggcctcaagtaatctgcccacctcggcctcccaaagtgctgggattataggtgtgagtcactgtgcctggctgaaatactgctttgttcttgatattagaagaaaaacaatgcaaatgatattgttaattgaaagatagttattggaatgaaaatagaaagtgcaccttccaaattacaaagcatattccataaagccaaaatcagtgacctctcccccaaaaacaaagttagaagaaaagctaaaaccaagtgcaatgggcatcagaatacacagatgtgtactggttaccacacacaaaaagtagtaagtataagcaggttaaattcccctaccgaagaccaagtccatcagacccagctttcaaacacagaaagactgacaataaaatacagaaaaggaggctcacatgcacacacacccacacaaagcaatattaatatcaagtaaaaaagtattaacaggacaaagggaattatttcaaataggttaaatatgtaatttacgatatacctataatacttatgaatctttatgcaacaaataacatagcatgaaaataaaacaatggaggcatactccattaaaacaactttcagaaactaaaggggaaaaacactttttaaatgggggatattaacacacactatctttgagaaataaaataggcaatacagtataatacggaagacttgaatgtagttatagcaagactggtttaacagctatatatcaaacttcacagaatccaacatctatgaaacatttacaaagttattattctaagcgatgcaaataaatccctcaaagtaagtgttacacaggtcacaagcaaactcaatacactgggagtccaccatcaagagtttaagctaaaaaattctcaattatttgtggattttaaacactcaagttaaaaaaaaaaagtaattctcaattacttgtggattttaacactcgagttaaaaaaactgattatataaacgaaaaataatcaacattgtgattcgcatataacaaaaactggccaaagctgaaataagagacaaatccatagacttgaatttcctacaatgcaagaactaagttttaaactcaaaaaatagaaataaaaaagttttattaaggaagaaatcaataaaaataaaagcaaaaatgacttacataatgaaattatcaccaagtattgttaatcactaagctacagacagttgaactggtagtactgcaggtaattaaatatcctcttaatcaaacatttatttaattcattaaaaaatagtcttattaagtgcccattatgtgcgaggtaccatgtgagggatcagagatacataaaagacaccattcctgctctaaaagttagagccctaagagggaaaaggtgagaaaatcagggatgtcagtacatgcacaaggaaatgaagacagacaaggtgcacttccaaagggagaacacccttgaactgaatcttgaaggacaacaggggtgagccaggcaaggaagagcatttcaggcagaccaaacagcagcaaaaaataaaaagccttgctgcttatttggggacctgtaagaggctgccagtgagggcagaagacaggtgataagtgatagagaaggaggcagactagacgaagaacattctgaaggctatactggggagtgtgacttttgtcctgaaggcaatgagaatcgaaattacatcacacagcatctgaggtgagtgagggagagagaaggggtagaagattacaaaccaaaagactgcttagcaggatactccactggtggggaaactgaggctctgaacaaagtcttaggtagtaggcagaaaagagataaaagagcaccagcacaaaatatacagagccacagagtgaagaaaaatactaccaatactgaacaaaataaacagtagtcctcccttatgctagggagatatgtttcaagactcccaagggatgcctgaaaccacagatagtaccaaaccctatatacactgtgcacaaatttctttttccttcttcacaatttcatagaagattcattcttactgtagatcttagcaacctcagcatatagtttttttctttcttattaagtcaagaacgctcaccttttcacttaaaggaagcactgtacagcttctctttggcatatctgattgccagcatcactactcttgtgttttggagccattattattattactattatttttgagacagagtctcactctgtcacccaggctggagcacagtggcgcgatctcagctcactacaatctctgcctcctgggttcaagtgattctcaagcctcagcctcctgagtagctgggattacaggagcacaccacaacacctagctaattattgtatttttagtacagacgaggtttcaccctgttggccaggctggcctcaaactcctggcctcaagcaatccacctgcctcagcctcccaaagtgctgggattacaggcatgaaccaccacgcctggcctggagccattattgagtaaattaagagttacctgaacacaagcaatgtgataccacaacagtttatctgataaccaggaccactgctaagtgactgacagttagctagcatctacagcatggatccactggacaaaagaatgattcatatcccaggcagaatggagcaggatggtgagagatttcaccacactactcagaatggcatgcaatttaaaacttatgaatggtttatttctttaattttccatttaatgtttttggaccctggttgaccacgagtaaccaaaacctcagaaggtgaaactgcagataagggggactaccgtattaagtagtaaaatgtgatattcaaaatgttttttattaggtacaaaaaatgcaaccttcaaaaactggaaaggcagcacttaatagatttcaaggttattttttctctttgcttaggatcatgcaaaggtctaatctctttttaaagaaaaaaatcacactgcaccggactcctcatttttttaatgacggaacgaacattcagtgaccttcacaaatccccaaattagtagcatataattctacccataatatgtgggttttgccccgaataaagcattcactaaaacagattcaaaaggagtcttcttctcacaaaagtatcttacacaggagatctcagtcacaaccaaatctgccatgctattcttcatttcatgcaagtttctattttctgcctgaaaactactgcatttttccgatctcttcagttttggtactagcactagttggccatccgttttatgccatgttttaggggaaaaaatcactccaagacagtttctataggagtgatgagtagagaataacaaaaccccagtgagatgccactacttggttcccaccaccccataaattcagaggatttaaactcctgcctcagcacaattagaaagcattgtacacctgcaggttgtcttgggactggccaccctgtcaaattcattcagcaagtgcccaaggcctgcaggaaaagccagtgcacaaaggcttcaagccagacccttccaacctgtacagtgtcacaaaccacatcaaacactagatgtcactctgtaacagccaccacactacatatccaaacagaaaacaagtaatagacttataatagcaagtttttgtacaactctctcctaaaggtatatattaatttaaaaaaaatcaacttaccaaaactgcattaacagattaattttaattaaagagaaaaaagctctctacatgtctcctgctatcctaacaataaataaacatgctcaggtttcagtgtgaatttcccatatctttagccctaatgcagtttctaccatctgcccttaaaagattcttggaagcatttttgctagtattgccttccacaggatctcctcttaagagtgtcagttaccaacacatcaagtggcacactatgtgaaagaggccagcatgccaggaagctcagggcacctggactgcaacagataacaacaagaatgtaatttcagacttccacgaacatcttatctccagtgtcccttcctccaaggtgaactgagtaatttggtatatcccgttgggtcaatcccaagtttctcacctataagtcttgatgcaaaagggagactgcagtctttaatactaaatttgcatattaaactatccattgaaactgactcctttcaactcaaacatttgtctaattaaaattactaacattctataataggataatcacattttaaccaggaaaagtgcatgcaaagaatctccaaaatggaccacatgtttatattttgttcccaccttccggtttgtacagatcatagacatttcacaatcaaaatcagacaccagaataaccacatgctatagagataaaggatctcagtcctatgttttattatttccccagtatccagtacaggcgatagcaccgaggagcaactacagagctaattcaccaccacaggcaacatatgagaccagtgaaaaagggtaccttggccacctggccctctactgtgatccctgcagagcagtctcaaggcaagatcacactatgccataacaataatgttatcatttggagttgttcccaaccaagggttcaacatcaataaaagccacaagtatggctggcattacaaagaaagccagatgattacacacctctattatcatttaaatatagccccatgtcataaatgtgacccaaaatcttagtcatgctaactagagacattcactttgccaactggaactcagggagactttggggatgagagatgggtgtctttgtcagctcagttcttttaaaaatgttctccagaaaatctgaattgatagtggctttttctcaattgcaatcagtcatttagaattatgacagtgaccaaagagctgcattcaaaattggaatcattcttttaaaagaaaacaaaatctactaaagcatctaaatatttgaaatcctcaataagaacttaaattccaaggattttagaagaatctgcttttcttgttcattttagttgttcttgtccctcttccactcaaaaaccgtgaagtggcccttacaggaaacaaaataaaaagcagtatcagcctgagaggtttgtagaggaagtccttcacctcggcatgggaggagggagcagcacggaaggatggctgcacactggacagcctggaataagaaataacaaagcagagaaaagcgcagaaactgtggcaactagttaattgtaaaaatatgattctgccaccttgctatgtattatttgcttataagaaaagccattagccattgtataaagaaagaaaaggaatcgttacttaatcctgtaggacaccgagcctgaatctgttgacttgcctagaattcagttcaggcattttcactgaacctccacaggagcttttaatttgttttcattttcaaagagttacaaaagatatgcaattctcacaaaagaagaggaggaggcaggggtggggggaggaaaagaggaggaggagaaggaaaggaagaagaaaggaaataaatctcagaattgtttgtaatcctattatattcataactctagtttttctttaggcaattcactattagtatctgaagtaaaatggtgctactaaatgtgaaaagttataaatgaatgcatttggatgggaaataaaatcaacattcaaattactggattgcatatacaaaacaatgctacagagagtgaaaatcagccatttgtttcatcttattggcactgtactggatatagctatattactattatcaggaaaatcattaaaaattcttttcccctactctaaggaaaaaaattaggggctaaatccactatctatataagctcacctggagcaatgaagaacaagagacccagtgctgaattccattaaagtaagacatagattccactacatccctggattcaccactggtcaaattatgaatcccaaacataactacacccagactgtgcacatgctgagtccagccatccaatccagcataacaccaaactgcagagaaggaagggagtcagtacatataggcgtgtaataaatcgcaagcaatcaaatttcaataccaaaggaaaaacaaaagctagcatccacaatattatttttctttctctgtatgtcctagaagaaacccacatgtcatctgcacttgctgtgtggttcacctgctgcagtttgcctcttccaccaatgcttctcaaataagaatctcctaccaaaggacgggtgagaaagagacatggtgcatcatcctggagtgcactgaaactgttttctttatcttgaaggggaaacagatggagaaaggttgaaggtgtggtggggagatgaagtcctaaggaatttggctagcctttatttaacattattttcattttaaaaaatgcatgaaaacagtagaatgacattgtgcatggcttttcaattctgtttgcagagggtcactttggagccatgcttctccaacctgtggaggtaaatgctcattcccctcagccaagggcactctggtaataagaagaagcccagagaaaccatttcagtaaaatcctaaaccttaagtcaaagtcccctgcattacaaggatacagatgtacaagatactaaggatttaaccatgtttaacaatgaaaagtggtctttcaaacgatgagatacggctctactggaggactctagagcctccctgtccaatacagtagccactagccacatggatcacctgaggccaggagtttgagaccagcctgaccaatatggtaaaatctcatctctactaagaatacaaaaattagccaggcatggtggcaggtgcctgtagtcccagctacttgggaggctgaggcaggagaattgcttgaacccatgaggcggaggttgcagtgaaccaagatagtgccactgcactccagcctgagcaacagagcgagactgtgtctcaaaaaaagaaaagaaaagaaaagaaaaaagtaacaaaggattgttaagtcacggttgttggctttggaagaatttgcttttcttgttcattttatatgtccttgtccctcttccactcaaaaatatgtacaaaaatgcacataaaaaacatggagttagagtttttacactctcattaggaaactaaggcatagccacattaagggataactatggatatccagccacagtcaaatgataacacaaggcagggctattatatgagtccaaaggaaagaatgagcacttccagcaggagttgccaggagaaattggtgggtctaaacaggtcctgagagaatgggccagatggggagaagagctaagggcagtccctgaaaagagaactgaataaactaagaggcagaagtgaaactatgcaaagagagataaaggggcagtgttagcccgacagagcacttccacagagtaaccacaaaatatgaagaagagctacactgagagccagggagaggactgtgagtgttagaccagcctgggccacactttacagactataaagaactcattcaggtctctaggaaggctaatgacaagatagaaacagggtttaatatagtggggtaatttaaataaaatttagaataaagaatctgtttatctgtgatttcaaatcctgtgatatttgaagaacatccaaatgagtggcactccaatgccagaacatgtttacgttttgaaattaagcctcttgtgtcgatgtattttaattggagtgtgggagggtgaggaaatatcaaattctataaactttctaaaacatacatgtataactccaaactattctatttctctagtaaaaggggatggcatacaacatggcagaaagcttgaaacagtatctctgaattaactatattgtcttattctctgtattcttgatgtgctgacatctggggcctcaatgacataggaaggatgcccctccaagggttagcaaattcccaaagatagtggctcagagcatgtttctgatatgcaaaccaaccaatcccaaatccgtaaccccaaccacatccttttatggactctatccccctcccctcaatcatccaggggccaggtgctggacaaccaggagctacccctacagccctgtcagctgaaattattcaaactatccagtcctaagcctatgtagtttacttacctggccttgcccattccttcctgcaaaaaaacacaataaaagctcctgccctcagttctgtctctgtcgctccctttcctctttgcgtactgattttgccttggtgcttccctgtttggctctgtgtgacatgtctgtttctagaggcctgtgagcataattaaaacttcttccttcataacaatcattttcatgtttctgtgccttaccacacctgattaaaacgaatctcaggtaccattaaaataacctgtcaagcttgaatccagaaggttctcaatgtgaattatttgatcttgagacccattcaccaagtaccttgtgtttctacaccaactctcctttcccttatgcaggtaactaattcaagaaccatcaccaaaatatcacttctgaaaagaaccattcaggattttctgtgattcagaaggtcattactggagctctgacatgaattcattcttaccagtagactcttccgctcaccacgaaatggtaatttatactccatgaggacgggaggctctggctaccttgctcattgttgtatctccagcacctacgtgtgtctgacacagtgcatacctaataaatgtgtctgatgaataaatgaattgtaaagaatagtatatgttgatatagacagcctatggaatacagcttagaaagaataccaacactcctaagtggtaggcagcatgccagtaagttagaataataggttctagagttagactaaaggttaaatccctactctcccatttactaagtgtgcacccttgggcaagtcacctaaccctacaaagcctccaacatttcattcataaaaactgggaagaccaaacctacttcagaaggaaaggattaaacagactagcccatgtaaaacatgtagattccggttaagatggtaaatgtaaattcatgttgtggagtcccacatcatcatccccacatctccatttgaaagacaaagcaatgatggatgaaatatggtttttaaagtacagtaagagtcataaccatagtaaaaaaaaaaaaaaaagtatgataggccaggcatagtggctcatgcctgtaatcccagcactttgtgaggccgaggcacatggatcacctgaggtcaggagttcaagaccagcctggccaacatggtgaaaccctgtctctactaaaaaatataacaattagccgggcacggtggcaggcacctgtagtcccaactactcaggaggctgaggcaggaagaattgcttgaacccagaaggtagaggttgcagtaagccaagatcaagccactgcactccagcctgggcgacagagcaagactccgtctcaaaaaaaaaaaaaaaaaaaaatatgataaacaactccatgaaccaacagaaactctaagtggtgtacatatctgaagctacaggcaaaggcagctggagtcaacttccaaaaggtacaagtgctcccactagagaggaaggcaggcaaaaaggtctgctcactgcctgagaccatgacctggactggctggtggccttcactgcacatcacttactttatcagaatactgtaatgtctccaatactctacatctaaaaactactgtttccttttccaaggttccctttcagtgcatccctgacttacaaggcagacagcagctctctttacatactcctctttcatgccttcttatctcttacctctatgctttcttccaagccatttcttatttatagaatatctctacatggtatcgcttttgtgatttaacacatcttattaattccacctcttctcaagggagcctttcctaattatttacaaagtggtaagtattcacttccaaacccttataaactatctctttacaagctttacagggcactatcctacaaagcagcaacgaagttacttagtacccagaatgaaacatacaaattacaacctaccttctaaagccagagacagagggaacataagcataaacaaaagtaatgcaagtttattattcactcatatttaccatgcaaaatgaaagttttatgaagccttgaacaatatatatttgttctattatacaggcaactaatcctctgtaaatggtaatgtatcagtattaacaccctccctagtctagaatttaagaacatgaagagaaagtatcaaaacttctgtgagagggataggtctagagtctctgaagggctttcctgctgcaggccaatggatccatgacaacaaatgtaattcttaaaacattgctgggctttgaagaacacagagaaactaacaagggactaaaaaatggtgggggaagaaggaggagcaaagagggaagaagaaaggaggcagaagacaagtaagccaaaacctgatctgtaagcaacatgcaaaagaaaaaactgcagaatgccaaggagctgatgccaacaccagcgctaggatttacaggtgactatcccctccagcccccagttcccagctatggtaagtttagggaactgaacctgaatttccattcataaaccagaaccctcaaatggagctaaagtgctctcaatcaagagcattcccagactcccggcaaaagcaaagacaaatcctctgggagaaaccaggattaacaaatgtgaaatctgtggtcattcagtaccactctcaaaatcaaatatcacaaaatatgcaaaaaaagaagccactgtgaatgagaggcagctgaaataaccagcataattagacaaacacttaagctactaggattatcatctacaaaatatgaaatattacacagtaaatgtttaataaaataaaagatgtctaaaaatgaacgaggatcaagagacaatcgaaagcaaccagccacataagaatgccaaaccaaaaaagctgttaaaaacatgaaaaaaatcattgaaatgtacagctcaatagattggtaaagtagcagatttgttccaaacgaagggagttagtgaactggaagaaacaactgaagagacttcccagaatgcaacacaaacagattgcgggaggagaaaataaaagcaagcttaagaaacagagaggatagatcaacaagtttaagtaagaatcctagaaagtatggccagaatgaacagaaacttatcaatatttgagaagacaatagctaagaatgttagagaactataaaacatatgaatccagagacttgagaaacatacatataccaagcaagataagaaatcttcaactagatattttgtaattaaactgtagaacaacagacacaaaagatcttaaaagaagcagctgggtgcagtagctcacgccttgtaatcccaatactttgggaggctgaggtgggcggatcacaaggtcaagagatcaagaccatcctggctaacacggtgaaaacccgtctctactaaaaatacaaaaaaattagctgggtgtggtggcgggcacctgtagtcccagttacctgggaggctgaggcaggagaatggcatgaacccgggaggcggagcttgcagtgagctgagatcgcaccactgaactccagcctgggcgacagagaaagactccatctttaaaaaaataaaaaataaaaataaaaataaaaataaaatttaaaaaaatgaaaaaaaagaagccagaaagaaaagacatttaaaggaacaacaattacaccaaaaacagagtttaaagctgctacaatggcaactagaagatagtaaaaatgtggcacaaacactactactactactattaccaacaccaccaccactactactagggtgtgtaatataaaaactgcttgaagacaataaagaccaagctaatggagataaaactgaagggattatgactctccaaagagatgcttctttgccaatacattttaaaactttggtgataagaacaaatcctcagaattcttcaaattcttagaaaaatatataacttaccaaacttgaatcaagaaaaaaaaaccagaaaatatgaataatactaaaacaagtctaaaactatcaaagaaattgaatgagtggttaaaatcttcacataagtaaaaaaagcaccccagttgcaggtggttttataggaaaggtaaaaaaaacatttcaatgacagctcattccaatcttatagaactatgttatataacagagaaagaagaaatgcttgacaacaggttttataaccattaccacaggaccagtcaaaaacaacatgagtatgagaaagaaaaactgaggccaacctcagctgtgaacagagatccaaaaatgcaaacaaaatattagtccaggctgggtgcagtgcctcatgcctataatcccacaacttcaggaggccaaggcaggaagatcacttgagccctggagtttgagaccagcctagacaacatagggagaccctatgtctacaacaaattaaaaagaaaaaaaattagctgggcatcgtgatgcacacgtgtagtcccacctactcaggaggctgaggcaggaggatcacttgagcccaggaggtcaaggctacagtgagctatgttcacaccactgtactccagcctgggcaataccctgactcaaataataataataataataataataatagtaatagtaattagtccatccaaaaatctagaactgtaattcaccatattaatactcaagaagaatcattatcatctcaatcaagttttttcaagaaaaaatttaaaaacttcaaaacccatctatgattttttaaataaatctcaaactaggaatagaaacaaagttatttaatttgatagagaatctaccaaaaagttacagagaatattactcttaatatttcacattaacaaaactctctttagatcaaaaacaagatgaccctttatcacttccatttaccaatgtactggaaggctgactcagggcggaaagcagaccaactggcaagtatgtccactccttactcatagacaatctgtctaccaagaaaacaaaaaacctgtagacaaaatgtaggaattaaacaagtcacatatatttacttaatccagcagtgggactgaataaacatgaactaaatttaaaaacatggataaatcttagaattaatgttgagggtaaaaagcatgtcgaaggtgattatgtaccataggagatcatttctattacactcaaaacaaaacaaaaccacacaagaaattatttaagggtacaaatatgtgtggcaaagccattttttaaaagaaagagaatgataaaatgcaggggagttactgtcacagaggtgaaaaaggatggtggaagagcacctaagtagcttttagttcctaaaatggtgaagggggagggtgtcaagagtatgtgctttattaccatgcttcctaacttacatatgttatagattctttaaccattacataaataatataattaagttgataaaatagtacaaacaaatgatggtcagtagatacatatttaagtaacacacttaattaaagctcctgttaaaaacaactcatttcacaggtttcattcaaaggacggtaaacacaggaaacataataaccactacagaatatgtgtatcaacatatgtgtatcaatagcgaatcaacatctgtactctgggaaaggagtatagctctcaaaggagagaaaggggaaccagggctattgagcactagccatgaagccaagtcctgggcaggaagtttcccatatcttgttttttttccataaactcagaaagcccctcaccataaggccctggagaactctcctactgtaggagatctttcctacagtgctttgccctccagccagctctgcacctgctcacattaggcctttcctttacagctataaaagtttatcttctcacactaacctaagcctacacctctcaaaccacaaataatttctaaaaaaccaacaattaactttcggaacctataattcagttctgagtgtgttctccaggtacccgtaatctggccacttatctaatacatttggacaagaaagactttaagcttaataagtcaaaaaccacacccaaacattgtttcaactttgaagatatgatcaatgcacacagatatacagatgcataaagatcataacctcactagtagaaaaatatatatcaaaaaaagtttttgcatgtcagatttatatatatatgtatttatatatatgagacgaatcatctctaatgttagagtataggaaatttacataagacttacatatcagtttatataacatttttgggtttttaaatttttttattttttacagggcagtttctcagtgtgaatatatgaccttttggagagcaattcagcaatatctgctactatttaagatgtgtgtactcctccatctaataatttcacatctaggtacccatacaggaaaaactatcacacatgcttgcaaaaaaagaaaatcacgagaaaattatttgtagcacagtttgtaaaagtgggagggtgggaggaaggaaggaaagaaaaaaatatatgtccaccaacagccatttttatttgtcttcaaataaaattaaagatcaaaaatactttatttccaacaagaattataaaagctaaataaactcatcaaaacttacttcaaaaaggaagaggatggagtccagctcctccctttgtgacttattattccctggaatattaaaaaataattagttatcatgacatcatttaaacttcaggacactacaaattatgctaaaaggcagcttaaaactagtaagcctcaacatacattcatttattcaaaaaatagcaagaggcagtatggagaacacattaggattgcaaacagacaaccgagcccgactgctcagatccacatccagcagagctgccccttgctagctgtttgaacacagcttccatgttttccaacttgttaccaaactatgatgggtaatttattcatttctcaactagttacttattggctcaaattgtggcagaatgcacagcacaaacgaaaaatttctaagttggtaatataaaaagtcatagagcagataactataaaagtagtatatcttttggggcaactgcacactgtcctattgataataacaacagtaataaaacctacaacacctgcagctgaggttaccattttcggtcctctctgtgtaccaagcatcgtgctaagtgcttggcgcatatcatttaatataggaatcaacaaacctcttctgtaaagggtcagacaataaatattttaggctttgcaggcctctcttacaaacactcaaatctgctgttacagtacaaaatcagccacagacaatacataaataatggatatggcttgtccaataaaacgttatttataaaacaggcagctataagctgtggacccctgatctaactgaatccccacagctcaatgaagtagatatcattcattcattcattcattgaataaatactacagaatgtctatatgccagggattattctaggccctgaggatacaggagtgagcaaaacagacaacaatccctgcccccaacaatttaatattctggcaggagggggcattctataaatgagtgagaaaaacaagaaggaatgcagacacagaagccaaaaaagatggtatgcaattttgactggggaagtcagagaacatctctctggtaaggtaacatctgagaaaagatcctttgaggttaggaagcaagccatatggaaatgtgggggtttggaagcaagccatacggaaatttaggggaggtgtattccaggcagaggaactgaacaatgcaaagtccgtgtagctcaacatgtctggcttagtcagaaaacagtcagaggcccttaaggctggagcacacaagcgggacagttggagaagctgaggttggagagtaggtgaggcaaaagaaggcagattaggtggagcctgagaccactgtaataacagggaatgagaacccgtttgaaactttacagcagccaagaatcatgatttgacccattttttttttttttttttttttttttttttttgagatggagtctcactctgtcacccaggctggagtgcagtggcgcgatctcggctcactgcaagctccgcctcctgggttcactccattctcctgcctcagcctcccaagtagctgggactacaggcgcctgccaccacacccggctaatttttttttgtatttttagtagagacagggtgtcaccatgttaaccaggatggtcttgatctcctgacctcgtgatctgccctcctcggcctcccaaagtgctgggattacaggtgtgagccaccgcgcctgactcatatttttaaaggaggactccagctgctcttttgacaagaaactatgggatgggagagggcacaagtgtggaggtgggagaccatttctgcagctaatgctataatccaggtgaggatatcaggagtttcagtgttaccagtgtaggcaatgagaacaggccggtgattctggatgtattttgaagatagagccaataactccggagttttggcctgaataactgcaaaggctcaagttatcacaagattatttatttcattattccttgtaggcattttcttttattcttttttaaggtacagtgtcttccctgcactccaatcgaacacagattatactaaaagcaaaagacttcaaaaatctcactatttttattggttcttcactatgattctttgcagtagattgcaagaatggccacaatcaaagaccaccacagtgcctcaccctgaattccttccactccatgcttgacaactgcctgttctacaggagcaatcagggcatctgacaaggggtcccttgatttttcctctccacctcaaaatgtctccatatctacactatccccttatctgctcctccttacatagaaaggtcacctgtacgctcctctccatgtctcttctttttccttgacctgtctcaactcacttcccccaacacctgcaccattagttatctccccctccagctgacccactcctcaatctgcaaacaggccaatgcattcctcaataaccttcccgtgaccagggtgagatacaatctgtgtcttcacatcaaactttctgaaaggatattctcatgggtcaccttcaacagctcaccgccctgtgactccatgtccatctgtttggcttccgacctgctcctcacctagaacctttctctccgcactcactaacaaccacactgatgagctcttactccccagcccagctgcacctcatgcaccaataggctgactctacatgccttcaattctctctcccctggtcctctgtgacaaaaccctttcctggtacccctcctactactccatcgctttcctttgcatatacccaataaaataaggaattatctaaaagttctgaccatcactctctttctctgtatatactttttcccttggcaataacacgatttcacctcttttctcccaagctccagtcacctatattgtactgtccagccaacacctacaccaaggtatcccccatgcacctcaaacacagactgcccaaagccactctcaccctcctgccttccaaatctggctcccctccagggttcctgcgctaatggcacctcacaaagcagactcagtgtcctgaaagcatctttgacttctccctttcccttataaccaagtctcatagatggtagacccactgagacacaacacttttcttttcccttaactactgcctccctggatcaggcatcaccatccctcagatgaatgacagcatcagccttccaattggtgttcttgcctctggttcaatcgctactttacaagatacttgtgatagtaacaaacactttcaagagctctaaccacctccagaacaaagtccaaactccttagcctagaattcaaggctccttgcaagcattatctaatttcctgcaaatctctttcacacacctttgctgcaagaaaaaaaaaatgcatttcccatacatgtcgtaagaacagccctacctttactcatgttctcccctccagcagcagtgccgctctcttccacctgaaatcctgctgtccttcaaggtccattcccaaggccacctcttccccaaagcctcatctatatactcagcaggaagtcatctctcccacttcccaagaaccacagaattctgtctaaatctctcttacagaacaactgactttttaacttttttcacagttatttatgcatatggcttattttttaaataaatgaatgacatctacttcatagagctgtggggattcagattcagcccacagactacatgaaaatgaaagaagatggtgacagcagctactacttactgaccatggactatgtgtcaaactctgtcctaaaatgctaggatacctgtgaacctgtttaacgctgacaggaggaagccagctcagagacagattaatttgcccaaggagaaacagctagaagggtggggccaggttcccaacccagtctggctccccaggctacactatcctaccacttaggtgacaggatgtataatgtatacagaacagaatgtataatgtgaccttgttggtttgattttcaaagaatatagtcacaaacatatataaacataatacattaataatatatctggaaggagatgcaggaaatctttaatagtggttgcctctgcaagcagggcaaaacagacacttgagtgttcatttcagacccttttatggaatctaaatttttttaatagtatgcatgtattacttttctttctttttcagtaacttactcctttgaaaatcatgctttctaagggttccttctgctatttttgctagccatgtgttgttcaattaacatccatataagtgaaagctcaagagaaacaaagatgccaccctgtccaccatgctctcacagctttgctaaaggcttggcaagaaagaaagcttaaaaatgtataatttgtggctcatgatatatacaacttataaaaatgcccgaatgttttttaaaaaaaaactactgaaatgcttaccttttaatttcaaactattttccagtgctataaaattttcatagaagatgaaatatatctgagaatagttggtctcaaaaaactgcttaagatcatttgcatccacattatctgaaaagaaaaagtttccatttatgacaattcactttataaaatcacaagaatttagaaacaaacttctcagaaaagaaggcaagtacaactagtttcattcccttataagacaatacaaaacaaaacagtattcctgtttgtttattctccacctaagagagttcttacttgaaccttgagtaccacccaccactcagccctgctcaggagaccgtggagccaattcagggaggtcggagctgacaggagccagcaacaacggaccagctagaaggctggaggtaagcaggggcaggtctggggagggacatgacttcctgttacgggatgaggaagtagaggttcatggaggaggcagtttttgacacaggccgtgaagagggatgggtttgtacctctgaaaaacaactttgctggtggagctcctaaatggaccaatctctgctccctccccaccaacataactctctgggcatgaaaagagaaaccagctcaagtgaactagcacatgctccccaaccacaagcttctagatgacctgcccccactcatgtatggacactgtaggatctaccatgtgttcctagagttgcccctcttgtactagacagttttgctaaaccacagactgcggatagataggcgggggtgtggggaacttagcacagtgacaactcccactggggctgattagcaatacagccagttcttccaagggccccgatcagccagggtaaaacctcacaatgctgggggctcaaagtagttatccactgtcaacacacctttgtacattttcctcagtaaacaaggttgtttgtgccatttacagagtactgaccaaggagttggcactttgggagaatacactagcatctgaggaaaagtaaaaacagctttctggagccaggcattgtagctcacacctataatcccagctacttgggaagctgaggcagggtaatcgcccgaactcaggagtttcctgaggctacagtgagctatggttgagccactgcacttcagcctgggcaagagtgaaacccctgtctcttaaaaacaaaacaaaacaaagcaaaaaacaaacaaacaaacaataaaaagcttccttaaaattctgcaaggattactcaagaaaaaaatgtgttgctcttcagtctgtaacagtgtggtaccaattgcttttgcagtcctaacactgtgaatctatgtgaacatacatattatgattttcaaattatataacgttagcaataatgcagatgattctgaagagttgtttttctctgataattgtataagagcttttcatgcaaaaatgtgccctggctctttgaaataatgcatgtaaggtgcttataaagtcttatgagctgccaatttcacactatatttactgcaccaaaataaaactgggcacacagctgtgaaaattcctagcaaggaacaaatttactgtgtgaaagcaggtagcaatgaaactagtatcaccaacccacatgaatattaaccttcctatgatctatacaatcttgacaaggaatccttgagtgccttgtggagaatttgccagttccaaggaagagttcagtacacttcaactctaatgcaaactgctagcccatctaccactaactgagccctctttctgaagccagcttcactcagctggctcctactcaccctcactagtcagctaaaacatccccatcttacccccaagactaggtctgcacctctgctgtgtggcccccactctatgcttccctgtcacagaacacatcacactttacttaattctggtggaattctgattgaattcctgacttaattctgatggaataatctgtctcgtctatgagacatattccctgccctcacagaacccacagtctatctcgtgaatcattatgtcccatgcatctagcacaatatttagttcaatattttcttgaattgagaatccatgaattagcctacacatacaatgataaaataatgactacaacttataaacctacagggaagaaatagcctaaccctcaatccttggggcaatcaaaagacaaatctcatctcatctctgctgaggacttctgatttccatctgcagccctgacatctcccactgtgggctctagtctcacagactgctgccagctgatttctccacgtgagggtcttaaaggcctctcaaattaaacacgtccacagggaagtcctccatcagatcctgttcttccctctggcttttccgtcccagtaagttggaacctccatccaccccgctgctctggccaaagcctgggcatcattcctcactacccatccccagtatgccattctgttagcctgcctttaacacgtacgtgttccagccctggactgcttctgctctccacggccctgcctggtctgtgtggccatgaaccctcacacaggctgtgacctctgcccattgcctgggttccctgcttccactcttcttccattccccatagcggccaactcgaatatttaatagagtcagtcaaatcagaccactcctccactcaaaaccttccatctgcctccagtagtacttaaaatccgaactctttaccatggccgggcaaggccctgcctgatttcccccactcaacacgaacttcactgcacaccactctccccttcactccctatcctctaaccactgtggattctttccattccccaaacttcccgaacatattcttcacttggggcccctgcaggatgctacccccactcccagatcttcatgcagctggttcagtgtatgagacaaagtagcaaatgtagacactatgtctgttcatcctgcttacataacagcagaattgcacaaaaccccttgccagcagaattttacaaagcccctgactcaaagactcggcgcagcccttgagaagaatgccctgaagatgataagcaggatacagcaccggttcccacatctcctgcctgaatcaccacattttcaaaaaagatacactcgtcttagcccttgcctcttcctgtatataagataatatctgacaggattaatgactacgcctctataatctataaccagatggaccctcacacccaaaccttggtaagattttgctctaatgtaacttctgagcacacttaatgtaacttctgagcacatgcagagtgcgccacctgtatataaactgtgggctaaagcactactttggaacagtctaacagacactctctgactctccctggttgcgaacctcagcaagacttctgaataaaactaactttaatttttttaatcaacaggtctcctctttcagaacctgggtcacacatgacttcctcaaagaaacctgcaagtgcccccatgtgtcactccacatttcctcctccccccggccctctctcttggtaggctctgcagtgaacgtgcctcagaatgccataagctggcaaacaatttctctagcatggaggaggtgggtgtgctgatgcagcaagctggcacagaaagctactgggagatcaacaagtccccatctttccctcccttattccctcattccctcagacactcaagtatcagcaaaccaaacaaagagggtcctcagcatgtttaaggatccctcttacacactgagatgtcctcatgaggccaaaagtccaggtaacaaccacctttatcctcagccatccaatatctttcttgtggataaggcattggtggtgttgagcttaagtactcactaacaagacaactagatacattccagggaacccaaaacacagtgaacccagaagcatagcatctacagcacactcagtttatgtacatgtgttgagaactcctcagtggtctgggcacgctcttcacacaattccccctgacagcacttcagaagagttgaaatcatccctttattaatttgctgcctcgttgtctggctgctagaatgtaagcggcatgaaggcagaaatctcatctgctttgttcactgttgcatccccagcctgaagaacggagcttggtacaagaaaggtacttaacacatttgttaaatgaataaccaaataacaaatatcagatattttatctttaattcaaaatctagaatcatttcttgatttgtctttttttaaaagactcatcagaagaatatttataaagcaagcataggtctcagggaagacaatcacaggcaatggaatttagcaacctgcgaaaagaaacacaagaaaggatcaaaagcctaatttttaacaaggctaatttcaagaaaaacagagatataacaggaaggctttgctcaattaaaaaaaaaaaaagacaactatgaccacaaacttccttcagacaggcaatcttgacccactcattcaaacatttactagcccctatccatgtcaacaagtgcggtgctaagctttaaaaaattcaaagagaataagacccgaggccctcaggggtgcacaggtaaacaaacaagtaacagaacaggcaccatggctgaagcccatgctggacaccaaaacagggagtggacaaggccacatggggaagctaggaatgctaatgtcatacatttatgtcatgtgttatgctttaaaggaaatgttcatgagtttattttatttgaccctcaccatagcccaatgaaatagatgggcaggtgtgattaagagaaagaaacctcagggtcaggatctccagtgacctgcccaaggtaacacagcctgttggggacgtcaacagaacccctgctctggtcctgcgactccataactgagtggtacaaagggacaaatgggaataaatcagtcaggaatataaaagaaataaatcatcaccttgaggatgagcaggagagccagaggagaaagagcaggaggaaaagcccaaggtaagaaacaggactgagtgacactgaagaagcagctcctggaacttgccccacagcctctcagggctgtagggaaaagggagggagggcaaggccacgctccagagtccagatgggaacccgcctttgaagggatggcttccagggtttggcatggaatggatgctagcacactggcttactactattacagaactcagggaagcatgtccaaattaaccacagagaagcaaacggcagacagcctggcagagctagaggtcatttctgaatttttaaagaaatctcctttaacttctcattttcctgcaccaccaaccaaagataatcttctacataccacccaaaatcaccctcttccactcctttgtccagctaaacctcttgttgattaagtatttctccacatctagctggaaggcaacagcaaaggttgagggcaaaacctctggggcagactgcctggattcaaatgcagaagccacaggaccttggacaagttatttaaacactccaatcctcaatttcatcttaaaaatagggctaacaggccaggcatggtggctcacacctgtaatcccagcactttgggaggccaaggctggtggatcacttgaggtcaggagttcaagaccagcctggccaacatggtgaaatcccaactctactaaaaatacaaaaattagctgggtatggtggcacatgtctgtaatcccagctactcgggaggctgaggcaggagaattgactcaacctgggaggagccgagatcgcaccactgcactccagcctggacgacagagtgagactacacctcagaaaaaaaaaaaaaaaatagggctaacaatggttcttacatcacacggctgctgtgatgataaaatgagcatatgtagaatgcttataagagcttcagtcagcattatagaaatgtcagtagttttagaattactttgctcctggcaaaggtcactaatcctaatacagcagtaagtactaccagtatacacacccacaaaaccagtgggattatccatctatttccttccacatataatcctcttcaatagcaattctattgctttttatttggaagggtcataacacagtctcacaaaaacctgcttcagcagacccctagaaagcaccaaaggaagggaaaaagtcctcatctcactcaggagccccagtgggatgctatcaagggaggaaggagctcgtgttcagttctcctctaatagggaatgacccccctgcaccttctatactgcctacacccctccattcccaagccagaactaagagccatccaagccctgcctatagtcctgtgtgtagatgaagataggtgtcctttactattttagtgaaattccctggataatggcactgaaggcctgatgatcaagataacaggctggtgataggaaaaagggtaagtgaagaatgtaaggcaaacttgacaacttaataaaacagtcattcagaagcactcagtgagaacaaggaaaataatgaagtgcaaaagaactagtcagacacaagacagaaaatgcagacaaggatggatatcattagtaatgcaccattacttacttataggctaatatgattctggcgatttcacatttaaacagctgcctaggtccctgggtagtttgcagaaatgccacaaatcattccttccttccatccacacatttggatggtgcccaaccacagtgatccaggactgatctcctgacttgctttggccaaaaaggccttaaaaatgtggcagtggttgctgggagagccgcaagtagttgctgatccaagcaaaatgagaaaattcatgaaaagctgaacccaacccaccagtctggagccaaccccaggcaaccgtcagtgagaagaagaaccaccccagcgaatacagacccaacacagtgagggagaaaaatggatgcctgttgctgtaaagctcacggaagctgctaggtttgggaaggtttgttatgcaacactattatagaaatggtggtgcagaagaagaaactcagtacagaacagcctcactggtcataagagccagcaaacctatgaagagatacccccaagtataacacatcatcccctccattaaagaaggaaaagcaggaaaaatgaatccaagttacagaggcttgcccactgacacaaactttctgtcaacagtgatccatgctagccagagtgaaggcaggaattccttttcctgacaccagccagtatgtttcggtacctcctatgcgtgcagtaatgtgctaactgcaggttagaagcttatctacatcaggaggcaaaaacctacaaaataagactttccagattcagcaggcaatcagatcattaaacaggaggtataccagggatgactggctttaatggccaatcaacactcttatcatcatcatcattattaaagagaaattcacatctgaaaaatgcctataaatacagactttaaaatgtctcctggagaatcacttgaacccaggaggcagaggttgcggtgagccaacactgcgccactgcactccagcctgggcaacaagagcaaaactccatctcaaaaaaagaaaaaaaaaaagtatcctggactgattatttgcaaatacaaagtattcatgtggatgaaaatactaatttacaaagcagaaaacttaatgcatcagacaaaagactccagccccagtgctatcatggcgtgaaactcgagatctggtcaaagatgcggtgtgacaagcccaggtggggaaggatggaataggaagtgggctgtgaaggaagcacagagtccccttagtccccttagctaagccctagtcatccccacaagtcagttcacaggtaaggacaccttgcccagctcctcacatactgctcttagatcccctcctacttctatacctcagtctccccgaccagactgttagcagagagtgtcaggtctccattcagccaaagcacaggtattgaatacatgtgtactaaataaacacatcaaacagcagaatttagatatacagagaggcttcataattaatcctttcaagcattcctgaaggtcacagcaaataacaaaaatgattttttaaaaatcgaggtaaaacctcttacaataatggaccaaaaaagattcctccaaatcaggagtcaggactactaccctagatacagatgataaattactaaaagtaacaagcaatgaaggtccaccctgcagctagtattaatttctagtaaatagtaacattttcaaaagaatgatggagcaaatgtatgttcatcccttaagttaccaatagcattcatattgttaaattaccttttatataccatctattatataaaagtctctatgttatgtaagaaaaatctgaaatcagaaacatcctcctcagcactaaaatttttaaacttgttgatatattttaagtgaatttatgttaatttaattatattcttttaccttttaacaacttattttttacaaaacagcaaggaattatcaccatcatatttgttttacacacacatatatattatgcctgctacaaatgtaaaacttaaggcataactatgagtaaatattaccaaaatcacactttctaaaaaataaaataagacaggaacagtggctcacgcctgtaatcccagcactttgggaggccaaggcgggcagatcacgaggtcaaaaggtcaagatcatcctggccaacatggtgaaaccccgtctctactaaaaatacaaaaatcagctgggcatggtggtgcacgcctgtaatcccatctccttgggaggctgaggcaggagaatcacttgaacccgggaggcggaggttgcagtgagccgagatcgcgccactgcacaccagcctggtgacagggcgagactccgtctcaaaaagataaaaataaaaaaatacaatatgtcctcaggcccgcaatttcctcctctcaattaaagtgaggaaaattggtagagatcacaaaaaaagactcttaatacaattgttacaaggagtttcaaaaattaaagaaaattaacataaacactctcagttagggagctcactcctcctgcagattcagccagcagctcagggcagaggttccctcagttcctggcctgtcatctgagttccatcccacaaaccgaaataccagcagcaaatcccttcctggattttctgcttcaagaaaatccacccctaacctcactcacccttccccaaaccttccctgtccactacccccctcatctctgtcatatctttttcagtctaaggttatttatagaatttctgcaaagctttatgaaccaaaagacataagtgtattctacaagtacacttgtctaatatcatcaagatttcgtatttcagaaaaattctctgaagtattatactttcaatctgcacccactttagcataaacatcactggaaacatgtgatatggaattactcctgaagtcatccagaacttaagtaataacatactcaagataaccctggcccctcctttaatacacagcaccccaccagagtgatgggagatcctccccttgctccttgcaagaccccccattccctcctccttacctagctaccatgagctgcctaagaaaccaaactcagtaaggagactataattagaagtaatcattgaccaccccctaggtacacatcaggagatatcccatcaggccttgcactcaggtttccatccatctcctgggaaatccaattcccacatgatcttcatctctgactgtcacccccacacagctctgggcatcactaatctcaccctagcttcctcaccctaccctcccacccactatatccaataaagctcaccaaattccgtcttctatgccacctgtaaaggctgtttcctttcagctgtacctgaaacctggaagtcccctcagcacactgcttccttgcagtctgcctggtaaggcttttgtcttcctcctacactcacataccaccaggcctaagatgagataggtggcccccttgctccccactgcaatctccagaccattctggtccttccctcacacacagagtgctcctctgctgctcacaccatctacctccaactacatctgtgccaactttcactgactggagttgcacaatatttcccacatcccaagacactctcccgaagattccagggcccgactgtctttcagtatattactagcactgtcttcactcctggtggtttcaacatttatatatatgatgcctgactcccccatttctaatgaggttgtcctctaccctacctctgccgcccacacccacagccagatcctagacctgatggttacttacaatcttcccacctgcaagcctcagtttcaagaaatccactctctcgtcacccgctatttcttatccttcccgcccactccttctggaaccctaagtccaacaactcttcaaccttactgggtccttgaatccaataaccccaccaccttgtcactatctctgatgcccctcaagtcctcacttcccttctttctcaatttaacttccacagttcctctttttagtcagtcatttcactgtccttcaacccctctgcctctttctccctctaacgtattcacacaataaaaccccagtctcagtttcaacctgattcaattgaaagtatttatcagagcacaggccatgtacgggatacaaaggattttttacaattttgtattaaatatttaatccatgtgaaaaaaaccagttttgtatatacataatttatgatgtataataaaacaaacaccttaaatcacccacccaacaaaagcatccagtccaatcaggctttgacaccactccccgacacagtgctaaggagttccacaccgctaatccaatggccaattttcacttctctccagggccaatagcagatacccatgtaatctgtgtccaagcaccactagcctggtccatcagaaggaaggggagcctagaatcctgacataaaacttctggatgtatggtggggcctaaagtgtatattcctattccaagtgatatagtttggatatttgtcccctccaaatctcttgttgaaatctgatccccagtattggaggtggggcctggtggaagacatatggatcatgggggtggattcctcatgaacatcctggtgctgtccttacagtaatgactgagttctctattagttcccatgaaaactgattgttacaaagaggctggcaccacctcctctctcttatcatgtgacgcccactcccctttgccttctaccatgaatggaagcttcctaaggccctcaaaagaggaagatgctggtgccatgcttcttgtatagcctgcaaaaccatgagccaaataaacttcttttctttataaattacccattattcctttataggaacacaaagggactacgaccataggaaatgaaacaaagtcatcttttagctccactgacaggtttgtttcttacatacaattacagccatgttgtacatacctgtttaaattataaaaaaattttccataaatatatattcaaaaatttatcataactgaccatttatttccacaagcattcttcatagtattttaaactaaaaactgagagcagcctggagcagacactgttgctttctctccagctccttcacctcacccaccaaccacaaacagaccctccctcttcctaatagagcctccatttgctcagggatctcctcctccacaaagcagtgcccctctcggaacctggcctgttcgcagccccagagggaggacctgatactgctgagccaattatggtggcaacatgctccttgccagtgactcaagcctgtgacccaatgctgatcaatacaaaacaacagaaagtctgatgaagatagctgagaaaagctttactgattttaaggaagaagtgtgcctttttttcctgcctttggatatcattctatctgggtgcaatggctgtgggcattttgccaccctgaggacaaacctgccacactaaggatagcaaagccaagaggtggaaagcatctggactgtcaacatcaccgaactcatgaattagccaactctggggcctccctgccttgggacctctttttataggagaaagaaattcttattacttgcttatatttgagttttttgttacttacaaccaaaaatatccttgtaggcagacagctgaaataaaatttgccaattccaacaggaaacaaacactagtgtcaactgaaatgatcacagaaattataatattaatcctacttcatttctgaaagcatattgttttcatttctttattcctataaagtaaaccagatgtagaacatcaaattcttagaaatcagataaatagtaacactccattatccaggagtgatagtccttgtgtaaaagtaattctgtataaagatatagtccaaatacttagtgttaaagtttttaaaagtagagctatttttacttaacatttttgacacacgtttctcaaatacaggattctaaaactttgtttttaacagatatcaaataccaatataataaaacacactatagaaactgatatccaaatcaaatgtgagttatattacattttaatatatttatctatcaggaatcaagtttcattagacattttaaagtcaatgcacacttggacctccttttcttgatctgaattggagctagcctacattataatcaaaatcgctcctgaggggaaaagttggagacagaaataaaatgactacagcctaggagctgtagtcacctccacccctctaactaaggaggcaggaaagtgatgaggagagtgtttacagctgtcgaataatgtctcatgtcaaataattatgattaacagtaataacagctcacaaaacagctttgtatacattgactcaacctccaacaaccacaggatggtgggtaccattcttacccccactagaaagggtaggtcactgccaagactcgaacccagacagtcaggctcccatactgttcacccaattaagtgtaatactaatagaaagttggccgggcacggtggctcacacctgtaatcctagtactttgggaggctgaggcctgcagatcacttgagcccagagttcaagaccagcctaggtaacatggtgaaaccccatctctacaaaaaatacaaaggttagcgggacatggtggcgtgtgcctgtagtcccaactacttgggaggctgagatgagaggatggcttgagcctgggatgtggaggttgcagtgagccatgattgagccactgcactccagcctgggcaacagagctagacgttgtctcaaaaaaaatgaaaaaatttcaaaaaagataccgtaactttaaaaaaaaaaaagtgagggaggaggttaagggaagcatgcctggaaatctattttgttttattttgctgtaaaacaaaaagaacacaggagagatatggtacaagtcacagaacttaatagttattaaatacaaaagtacacccagaagttggtttgtttaaaaagtacaccagagccagtttgcaggtggaatgaccttcctcctagacagttcaaaatggtggcatttctgtgaaattaactcagtaaagactgaagtggctttccccaaggaaccctctttacctccaggaaatcatcatattatcccagcttgtgagcagcctccaatattgtcatctctgctgtgtccctaacacaagaaaacgaaggcccttctggtcactgggcagtcactcacaggcacacaatctgctaacagcatgtgaaggcctgaaactcatgacctgaaggatgggtgatagggaattttgttataggagtccagtggaacacactacagccattgaagtcttatgtaattcttcacttactgatgtggaaaaatatccaaggctttaagtcaaaaacacagtgttagaccatgcagatgactattcatgtaaaaccgtgtttgtgtgtgtaagcgaggcaggtgcagggaagagagagagaaaggaatgcacccaagcaagagccagcctggaaagcacgttcaccgggatttcagtaatgcttggcaggggactgcagaatttgagaaccccttgatacctaaattatttttcatatattcatattatccaaatgtttataatgagtatgtaaaattgtagaaccagaaaaagctataaagctgttttggggggtacttccagggcgttcgagaaagggatttttttcaaagcctgaatatttactgcaaaaaactcatcaatcatgacaccaggccatacttttttccaaacctgtcttacttttcaactttgaagaaatcttaagacccaaacaatatataaaagagtatctttaccaattctaaaatgttgtaaaaaacagcaaatgacttaaattttctctatccaacttttaaattactccttctgtaacagcacatacatggtacataatgccttagaatgacctagttatctggagaagctttgctgtttttgtgtttctctagacatcattcactgaaaaggataaaaaataatagaactgggcagaaagacatttctctgtccagccattcagcagctagcactgagtaggcatgagcaaatgtttgacacttttgaatgcaaagatgtgatgaaatttccagtcacaatgagacccattcccaagacctgggagccttagtccatatgagtcaacctttccttgttgtgcttaaacctgacgctgactgactgtcaactgacagaacagaagcttcttcatagcacactataaaagtgctaaagacctggtttatgctcagaaatgatgtctctggaagaatacaaatgattgtcctcctgtatgtagctaacctaatactgtcatattttgaaacaccacagccacctttctgagtaagacataaggttcagttagcaacactggttcatagaattacatctttgcaattaacactgagccaaagattaagattccctcaggtctttccattgagaaaagaccaacataaagcacaactggggtcctaatttgggtggatatctgatgtggagccaatctgcagtgtttgctgcctttgcaaccattcatattaaattgttgttgtactgacccatcaacatttttctggtctcattcttctccagccactgacagatctccattttttttttgtcagcatcaagggcactttttaatatgcctgctctctgcctgtcagtagatttggggataacagcaagcccgtctccatattgttacaagctcaggccgctgtgtgggcccattacatggcccaatgtactccagctttcctgtcccactggccacaaagtgtttccgtcctgtcttctcatcactactcgctgctgcagtaaggagggacacaggctgcctgtccccatcttccttaacacctttgcttgctacagattccacagccactcattcctcttctctggcacttctttctctctcttccctcttctcttgtctgcctccagtcactggtcggtttttgggccaaagatctgaccttttataaagtaagccaaagaaagctttgttacaaagcttgtggtcagaaaacctatctctggcaagctaaccaagcaagtgtagtctctatgagggaaccacattgattcctttacacctaaaggtcagttcagatcactcctctgctctttgcttcactggagtgccccatcttatcttacttagagtaacatcccaagtccttactgggatgccaaagttccacaccatcttatccctatttcccctctcccacccccgctcctttcccagttccttctatcctccacccctccacccctattgacttccatgagatttccagtctatttatgactcagatcctggtacttactgttccttctgcttagaacactattccccaaaaataatcacaaagctgctcccttgcttaacccaggtctcagtccaaacctcccttcagagaggccttccctcaccccaatatctaaataagcatacacatacccttatcaagcttaatttttctatcatcattacctgaaattgtatcatatatttattatttggtttttttgttcttgatttttagagatggggtctcactgtgttggccaggttggtcttgaactcctggcctcaagcaatccacctgcctgggcctcacaaagtactaggattacaggcatgagccactgcacccagcctgttatttattgtccatccaccctaatagaatgaaagtcccataagtgctagggcttcatctgcaaatagcagacactcagtcactatatgtggaatgactttaaaaacagtggaaacagtctaagctatgtagacttaaagagtggtcaatcccatttgttaaaagggcaacgctttacttccatcaaactagaaaaataatcctctcacttgagcctgggagagcaaggctgcagtgagctgtgatcacaccactgcactccagcctgggtgacagagtgagacctccatctcaaaaaaaattttttaattaaaaaaatagaaaaataatcctcaaatatgactcccataatcttaaatagaatttacagaatgtcatctaaggtttgctcaatgttttatgattattagcacaaaagtcaatgaatgtcatgtggtacaaatgggcgtgggcagagctataagcagttctgttgtgggaggtaatgtgccagaatgcctttcctctactttctcggaaagacaggagccagaatgaggttctatctctaggaacaggacaagtgatccaggctgaccaatcacagtaccccatctccctcacccagcgattggtacaggaatgggtacaggccctaggggagtggccacactcctctcaagggttactagctgccaggacatgtcaggctggcaatgctagagaccaccacacctgtacctggcagagttggcctgagaatgaagcagaagcacagaaaacaaaaaacacggaaccaaaggtagagacaattttccaccaagttgggaggtgggaaaagagagtggatatgagactgggtaagtaccctgaccacatacatccctgtggacagtcatctctaaagccaaacgctcccttagactgtttagttacgtatgtcattaaatcctctttggcatgggtttctgccacttgcaacctaaaagtcctaagaattacaaatacaaatgtactcaacatatactaccctcctggtggagcagaataattaagaaaagaaaaaaaaaagcctagtctggttaaacatatacatacaggtggctgtcaagagctggggagaggagggaataagcagtgaatgcttaatggttagttttccaggggtgatgaaaatgttttggaagaagatagaggtagcagttgcaaaatgctgttaatgtattaagcaccactgaattgtttacttttaaatgatttttttttttttttgagacagagtctcactctgtcgtccaggctggagtgcagtggctcaatctcggctcactgcatcctccacctcctgggttcaaggtttttggtttttggtttctttgttttgttttgtttgagatggagtctcgctctgtcaccagactggagtgtggtggcacgatcttggctcactgcaacctccatatcccgggttcaagtgattctcctgcctcagcctcccaagtagctgggattacaggcacccaccaccacgcctgacttatttttgtatttttagtagagtattttgtatttttagttttaccatgttggtcaggctggcctcaaactcctgacctcaggtgatctgcccacctcagcctcccaaagtgctgggattacaggcgtgagctaccgtgcctggtctaaaatgattaattttatgttatgtgaatttcacatcaataaaaaaaattaacattcaaacaatgctgcaaagcacttcttgatggtagaataggcttttgcgaaagaggaaactgggtcaaatgggatatacatttcaaagatcattgatctgtattaacaaatgacttttcagaaagattgttccaagttacagtcctatcaaaaatggagacagcttacacagtatactatcatcagagaaaaaagacaacagcaaatttgctaatataatggatgaatatattttaatctctaagtttatatatttagattactagtgaggaataaacactgaaaacattcttatgggtcttggcatttgtccatttgcaatttacatatacatatattttgaacatttatttatcacaatttttctggttaattacacgttttttatgtattatgtatgtaactatttctcctcttataaatttcaaatatttttccagttcattatttactttttacttcaaaggtgatgtgtctgtttctatatttatttattttaggagcagggaaagagaaatggaacaattctttccaaaataaatatttgcaatatgacacacacagacaaagacacagacacatgttgagaaagactagaggatattttacttccactccaggagttcagcataagctataccacgtcaagcctaactggccaaatgcatcctcatcttattagatactatagagtccatggaatcgagagagagtctgcactgtttacaccaggaatatgaccagacagaaataaaacacggtaatccctaacagaagttgtaaagaagcaatgtatgtcttcagttcccctctcttccatgcagttctgaaaacactatcaaagatttcatttaaaaatttttccaaataaccccatttaaaaaatgggcaaagacatgaacagatatgtcacaaaagaagacatacaagcggccaacaaacatataaaaaagtgctcatcatcactaatcatcaaagaaatgcaaatcaaaaccacaatgagataccatctcacaccagtcagaatggttattaaatagttaaaaaaaatgacagatgctggtgaggctgtggagaaaagggaacacttatacactgttggtgggaatgtaaattagctcagccaatgtggaaagcagttttgagtttctcaaagaacttaaaacagagttaccatttgacccagcaattccattactgggtatatacccaaaggaaaaataaatcattctaccaaaaaaaacacatgcactcatatgttcattgccatgcgattcacaacagaaaaacatggaatcaacctaactgcccattagtggtggattggataaagaaaatgtggtacatatacaccatggaatactacacagccataaaaaagaatgaaatcatgtcttctacagcaacgtgaatgcagctggaggccataaacctaagcgaattaatgcaggaactgaaaaccaaataccatatgttctcacttgtaattgagagctaaacaccaagcacaaggggacatggcaataagagacaccgtacactacctagaggggggatggagggagtggggtatgagttgaaaaacaacctattgggcactatgctcactatgtggatgacgggatccataccccaaatctcagcatcacacaacatacccacgtaacaaacctgcacatgtaccccctgtacctaaaataaaagttgaaatgtaaaaaaacaatttcctcactagctgtaacaggtctttgattgggggatggggtggggaatgtgactcagttttggttttcataaatttaaaactttacaataatgtctctccaattttgttctcatgaaagactatctggggaatttgcctaagcctgcccttgccaacagctctccagcattactgcccctctttcccccgaaccccatcaaggtttacgaacaccaatctcttctccctttggttcacagaaatagtcctttcttatatctattccccttagaatccaagggattggtctgataatgaatgtgtgtaagcaaaggagattagagaattcatttgggagaaaccaccactcttaattcatgatcttgaatcattaatttaatgttgggaaattctgactgatgaaaacaagcctttggggcaggaaggctttcaggaattgtttaagccatgacggaccagctcaactccccagtagacttagatctagctattctgaaatcacatttttggttgttgtgggttttttttaaaaagttacttattctaaactaagattgcaagctctggtatgcctagtgctatgcacaatgtctgccacgtagtttgtgttggacatataactgctgaataaataaaggaactcgagccagctccctgggttcaaatgctgattctgccactcattggatgtgtaaccttgaacaaggttcttaacctgtctgtatctcatgtgtaaaatagggataatgatattccctatctctttggggcagattaaatgcattaataaatgtagaaatatttagggcactgttcagcacataaaaagtactaaataaatattattattattgaaataagggagtaagttaccaacagaaatcaagatgaaaaagaagctgctcaggttctctatgcacttatcatttagtgggaaagaacacggataaggcatgaacacaaataaacatggtgtgggccgggcgcggtggctcacgcctgtaatcccagcactttgggaggccaaggcgggcagatcacgaggtcaggagttcaagaagagcctggccaacatggtgaaaccccatctctactagtaatacaaaaaaattagccggcacatgcctgtaatcccagctactggagaggctgaggcaggagaattgctagaacgggggaggtgaaggttgcagtgagtggagattgtgccactgcactccagcctgggcgacagagcaggacttcatctcaaagaataaataaataaataagcatggtgcggccaggcgcagtggctgacacctgtaatcccagcactctgggaggctgaagtgggtggatcacaaggtcaggagttcgagaccagcctggccaagatggtgaaaccccgtctctactaaaaatacaaaaattagccaggcgcggcggcaggtgtttgtaatcctagctactcgggaggctgaggcaggagaatcgcttgaacctgggaggcagaggttgcagtgagccaagatcgcaccactgcactctagcctgggcgacagagcaagactccatctcaataaaaaaaaaaaaagaaagaaagaaagaaaagaaaagaagcatggtgcaaagccaaaggccattaataccaaacaaaagctacaaagtgctgtgggaattctgagaagagatacattcagggcaagaggatgaagaaagcccacatggaagataaaaagtgttggcaatgtctcctggaaaaactgtagatggcaggatggacaacaccatccaggaaatggatggtagattagtgtgggttctctgagaagtagaggccaagacaggattagacatgcaagagatttattggggtaaatgcccatgaaggataaatgagaaggagctggtgaaggcagggagaggatttagaccacgatgcaggtctgacccctgggaaggagaaggggaatgaaggaaggttgagtaggaagtgtcagacttcaacataggtctgagaaggtcttaggccaataggaagtcctcaagccaaagtggcccttcagaggcatctgaagtgtgcaggaacaggcagcattaatactcctgcagtgctcagtaatgggctaagagcttcccaagggaaactaagctttggctcaaaattggtagattcagggagcagcagctggggccatcagtcaatcatgctccccacaacaggagaagcagcacattcttatggctctcatagtcaggcacaagcaatgtcacaagtaccatgcttgtactttcaggcatggttaaggttcaatgaatatgtgtcatcacctgaaatcaaacacaatatccatgggctcctgaactttatcaaaagggatttttttaacttaaccataattgtaatatcaaaatttgattactactttgtccaggcatggtggctcaggcctgtaatcccagcagtttgggaggccgaggcggactaatcactggaggcgaggatttcaagaccagcatagccaacgtggcaaaaccttgtctctactaaaaacacaaaaattagccaggcatggtggcacaagcctgtgatcccagctactcaggtggctgaggcatgagaatcacttcaacccaggaggcagaggttgcagtgaggcgaaattgcaccactgaactccagcctgcgtgacaaaccaagactccatctcaaaaaaaaaaagagattacaactatttttaaaatagctgtggcttcagtttctaaaacaacataaaagacataaaatggttatgaaacatcacttttctgaaaattaaggctaaaaccctgaattgaggattcagaatgaactcagaaacaaatctactaagaatctatatggtaaatcctttaaatgacataatctctctaaaattcctattttaactttatcaaattctcaattgctagattttgctagcggattctggatcctctcacctgaaaatgctatttgtattgacacatccaggaggctttaactatgtaaagataacctgtattagagaccacctaaaatacattcacaaatagatatttaataaatttcttttataattaatatgaactgattgcttaaggtagtaatttgattaaatgagactatgagaagacattttgcaaaagtgtaaactggtacatgaacatgagatatcaacagagttacattttatatgcggttaagtcacaagaaaggcaaaagtagaaaaaattaaaatgatcctttaactctggagtcatacccagcagggggatgttctcacaatgaaaggcataaaggaaagaagactatggacgacatggcgggttcctatgtcccaccttaggtccactctagggcacatgttcattgagtggaagggcacacaacatctgtgctacttaaactggcctcattctatatagattttccgccttcttgatgaatatttaacataaacgttaaatgcatttttcagtcactccctaaggaaaaaaaacaaagccttccagataacagatgtcctttttttaagaggttatgtggcacagaagagggagcaagacatattcaagttcctatcaccacatgagtaagaaaactggctcagcaaatgacttcacctgctaccttcacagagggtacagaagccatggtgtgagaactccctccatgtccccatcatctagcaccccattcctgcttctttcaagtggccttagaggaagaggtgtccctcttgttaagcctgatctcccaccccaggctctcagtctcactgcagatcacaccgttctgcattattatcccccgtttcttcagttttgctcttcattagctacttctcctatataaactcaaattcctccagttctaaaaaaatataaaagtcaaatctccatatacacaaacacctccatgttaggtactctttcaactccaagacccagaaatatgactcaagctagttaacatgttaccagttcctgcaactgagcagctcaagaaggtcctggcaaagacatggccaaactcaggactcatgggcttcctctcactctccacctctctattgtcattccctctgagagtaggattcaatttaaggcacatgctccccacatggtgggaaaaacaaatgccagcagcccagactatatcttcagggcttgcaatccaaaggaagggagctctctctctcccagcatctatgtttcaaatctcagaggagaatgggattctcagacactaaatgggaagagataggatgtggctcctcttctgcttaaaacccttcactggagtcccaacatctacttacgccacaggataaaagccattgtgcacttaactccatggtgctacacaccattacctttgcacaagctcctctctctacagaaccctcatccccaacttgtccatctggtaaaatcctttatccattattcaaaacctacctcagacctaagctccctaaagaagcactggctggtgtctccaggaggctttgctgctgttcctcctctgcacctgtgcccacctctatggttccaccacactcctctgtgccactcaaaaccctcacggtaaatttcattgtttacatggctatttctcctaccaaaccataaatcctgggcttgtgccttattaacatccaaacacagacttacttatatcaggcatgcactcacacagtctttaaaacaatgtttgtgacttgatttttgttgttgttgatacagggtcttgctctgtcacctaagctggagtgcagtggcatgatcaaggttcactgtagccttgaccttctgggcccaagtgatcctccagcctcagcctcccgaggagctgggaccacagcacatgcaaccatacccagctaatttcttcattttttttgtagagaaggggtctcactatattgcccaggctagtactgaacttctgggctgatcctctcacttaaccctagcaaagtgttgggattacagccatgagcaattgcacccagcttgatttttttttaattcaagtacaagaatagttgtttaataccttatattcgttattcttaatttcacagaacaataatttatatgccttcttttaaaaaatttttaaaattcaaattgaaacaacttgctattttgaaagtcaagttttgttgttgttgttgttttgttttgttttgttttgtttttgagagtcttactctgttgcctaggctggagtgcagtggtgcgatctctgctcactgcaacctccacctcccagattcaagcagttctcctgcctcagcctcccgagcagctgggattacaggcacgcgcaaccacccctggctaatttttgtatttttactagagacggtgtttcaccatgttggccaggctggccttcaactcctgacctcgtgatctgcccacctcggcctcccaaagtgttgggattataggcgtgagccaccgcaccccgccaaggttttttctaaataaaaaattctctatagttttatattgataccccgtttggtaaccaaaaatcagtactctacatacctagtaaaagtattatgcctgtccacaaataaagtacttacaaaataaaaatccaaattataaaagtttacagcaaaatattctagacctaccaattatctcccttctcagagtaaaagatggaagccaacctttttcagttatcttaaacgagtttggacatttaccctgtgttcacttttctcacatcagaagtctagacaacctcaagccttagagggatggatggtgtatttgtgctacatatacgtgtccaaagttccatttacattctagaggttataaatgtaattgatgaaaaaacagcaaaggaagcattacgacaaaatcactttgtaccaaataaggtcaacagagagagaccatactaagactgcctgaagagtttgaaattacacctcccagctttgttctagttgtagaatgtccacgtggcattaatgtccacgcaaatatttatcacctgctaggcctgccaaggttacagggaaggcaatgaacactaaaacaccggaggagattgtttatcgtctgcccatgctcaaatcaaatatgataatcccaagtctccctagaaaaatgcagaaaaatggaccagaaagagagaggccaatatcacagcaacatttctgggaggcatgcaaaaactgttgtgattttgtttctatgttatcattcattctactagataaatacattttctgatatgtaaatttccttttgaatcagataactagcagaagcataacatggccttcataatcagataagtctcagctttcccacttgctggcagacaagtagctattctcactgagcttcagtttcctcagctggggataggaacacttcctttgtcacagttgcaaaaagattcaatgatgtcatgatgataataaccaataaaactaaatatatgatagcattctatcatttcattaaggtccagatcccatgtcccacaaccccccagacacgccacttggatcttgccttttcttaaactcaacatgtagaacaccaaactcatcttccccgtccttgcccaggatcccttcccccttcccaattgttctcactctgtagatgacactcctattatcccaaatacctaccaccaattatcaaattataaaaaggtgtttattggtagtcagactacagtgaaaatggcagcctcaatccttgctgctagcagggccaatggagcaacacttagaaaagcactgtgaaacaagtcatcgaatgttcaaacccagcaatcttacttcaataaaatctaaggaaatatcgaaaaagctgcttctcaagatgtttactgcagtattacttctatcaggaaaagggaaggaagaaaaaaaaggaaagaaggaaggagagaaaagaacaaaatttcacaatccaggaaatggtaagctaaattatgggatatggtctcaacaaatgtttgtacttaaaaatgagaggaacaaaacatcaaaaatgctaatgataaaataaagacaacagttacaactgtaagtcaatttgttcctacctagagcaacatgagcaacatatgcacaaaaggaactatacgacaatgctatgttttgctctgtttgtatatacagcatttgtgagagacggttctctactctctggtccaaacccaggtcacttgatttgacctgagtctggcttctgatcccccagccagcctcagcttctgcttgtcaggctactgttccactccttccccaggaacctaccctacccctggcctatgcaggacactggggacatcctctgggcaagggtcctcagtgcccaacaccacacctcgccatgttacttaccatcactgtcatgttacttctgccaccagctcttccatcttcccctggttgtaattgaccttcccctctactttcccagattctaaccttgctatgtccagtgtgcagccactagtgacatatggctaatgagcacttgaaaaacagctagtgtgaactgatatgtgctgtaagtatacaatatacactgaatttcaaaaacttcatatgaaaaaaagatgtaaaaaatactgatagcattttatattgattacctgcagatataatatatattaaatacatggagttaaataaaatgcactattaaaattaatttcacctgattctttttactttttaacatgtggtcactaaaaaagattaaaattgcacatgtggcttacattatatctctattggacagaactagtctaaccattctttggaacccagcgtaagtaaaacgttgatatgatttggctgtgtccccatccaaatctcacctggaattgtaataatccccatatgtcaagggccgggtggagataattgaatcatgagggtggcttcccccatactgttctcatggtagtgaatgaatctcacaagatctgatggttttataaatgggatttcccctgcacaagctctcttgcctgccaccatgtaagacatgactttgcttctcattcaccttctgccatgattgtgaggcctcccgaggcatgtggaactgtgagtcaattaaacctccttcctttataaattacccagtctcaggtatgtctttattagcagagtgagaacagactactacaaatctccttaaagatgcccctatttttatgacattcttaattatctcttttgttctctgaaatcctataatggattctaccatatacctgaccatctaattacataacacaccataaatttactattattttgtatctattcttctcactacatcaatgccagttctatatcctaatttaggactcatagtaagcactcaacttttaattagaatctggccaggcatggtggcttatgcctgtaagcccagcactttgggaggctgaagtgggaggatcgtttgagtctgtgagctcaagaccagcctgggcaacatggcaaaaccccgtcttctacaaaaaatacaaaaatctggccggacatggtggctcacacctgtaatcccagctctttgggaggccgagtcgggcagatcacctgaagccaggagttcaagaccagcctggccaacacggtgaacccctgtctctactaaaaatacaaaaattagccaggcatggtggtacacacctgtaatcccagccactcaggaggctgaggcatgagaattgcttgagcccaggaggcggaggttgcagtgagccaagacggcaccactgcactccagcgtgggtaacagagtgagactccatctcaaaaaaaaaaaatacaaaaatgagcctagtgtggtggtacatgcctgtagccccagctactccaggggctgaggtgggagattactcgagccagggaggccaaggctgcagcagttgaggcaaggtcaaactactgtactccaacgtggacaacagagcaaagatcctgttaaaaaaaagacatggaatctttgctggagcaatatggtaatacacagggttttttggtttttgttttgtcaacagtgtaggaagaactggaagtcacaggacctaacagctcttcgttcttcctctaacataagtaaaccgtctgctacatggcttgatacgtgtcaagcctgcctgtgcctcagcttacccctctgtaaaataaagttaatcataccagaccagtctatagccaggtgaaagtatctacatccaaattggagttattaccatgatactaagaaatactctacttccacagctaattttatgtttctcacccagttgttttaaatacagactactttttaggaaaagagaacaaattcatcactattatcaaaaataagaaagacggagaaaaattacctatcaaaatactggtcctatcctattaatggtgggagatatgtaatgggaaagaaactgttaaaggcctacttcaagctgaagtcatttattcatcatactcacaataatcctttaaaaagcaaacattaccatacccattttacagagcaaagaaaccgaggttcagagacaggctacgtaactagctcaagtcatgaagctgcaggcggcagggacaggctgcaaatacccaagtaagtggcataatctttgcatacttaaaaaaaaactttattatcacttgaagataaaatatatgaaaagcaaaagtgttatataaatacacacataaaaatacaatagtaattactattcatttccttcaaatagtttccttaatcttggcttaattcctaactttcagttcaagaggcctttgttttctaagtagactttttttcgagtagcaatgaaatagaatatgtgattaggtaggaactagtgcattacgtactactttttaagtctttaataaatcacaggagcaagtgaaagtttacattaaatattatgactagaattcctcagacacattttacaaaaatctagtccctacaaagatcacagtaataaacaaagcaaactgggccactccactagtaagtatatcaacaaaaaacatacacctaaggaaatataaaagaacctctccatgttacaaaactgaggtcatgatgagttcagtgaaatgataaaagaaagttccctaaaataagacctacaccttagagtgaaactacaattttacaaacttgaaaagaatcaactttctcagaatgggaacaatgtactgtgtgctaagaaataacctgatctaggtttacttgattctgcctttataaaatgtagccaacttaatcttgcagacctggacagaacaaaaatttaaacgctaaagcacagaaaaaggctcaaagtatcaaacgctttaaaacacagctcaactctcctttatcaaaaatgtccctgcagtaggtgttaatcagtcactaccaggaactccacacaatgcaacctgtgtattgtgcaacctgtgcgtgcatggtatctacaggaagtagaaaattcagtttaccaagaacgccacacttcactctccacacttcactctcaaaagtcttgaaaacgaatccctgtaacagcaactaatttacatttcatttcaaactgaacaagtcagtgtaacctcaaggtatgtgagattgtgaataacttcacttggcaaaatcaggtgtggtttggtttggcttgggttcttctccccctcagaggtagaatataaatagaaataatcagcaacttctgatctcatgaacaagatctttatttaaaatcttcacacgttaaatcattttatgcaatattctttcaagtgacagacacattagcactaggcgatttttgtgaattttgggactaaaagacacctggaagaaacataaggtgttctttccttcgccaccaaatacacaggtaagtgtgtctatagatagcaaaggtgttttcatcccaaagaaaagttaagacttaggatgtaaaaaaatacagaaaacaaaacatagcctaggcgaaccagctacagatcacatgcagcaggtgacaggaagccttgtggacacctcacacccacaggggcgagcttcatcacaggtcaactccaagcccacctgagctcctcagaacctccacctggcaggccataaaccagaaggtggcagacagcatcactgtcatgccggtaataaaggagaagcagcctccctgaacccaagaaaaccacccctctctccaagcaggaagagaaggccccttcacaccaaggacacaaagaaactgaagcagccagacccaaaataaaaattaaatttaaaaagcagcatgggaagacagatgacaaatctgtgctgggatcgcctggaatctcggtctatatgggggtctcacactcaaaagtaaaaataaaatttaaaagggggatgacagagatgagagcccaattaggtctgtgctgggttcacttggggtctcggtctacttagggtctcagactcaaaaataaaattttaaaaatgaaagggggaggtgacagttcaatgtgtgcacgtgatgaccacttgggatccagttcacttgctgggaggacaggggacaggtacctctgtgcccggcctccaggttctccgggagcgcaggcgcccagcgagaatctgggctaagtttaactcgagggcgacgggagcagtgcccgagggccaggctgcggctttctggaaacaaagccccgggggtccaagcccagatccagggaagggggtcggacgcccacccatccccctccccagcctcccagccaccgacccctgcacagaggagcgccctcccggcaggtgcccctaacccggcgccccgacccccgcgcccggcgcgcgcctcacccagcagcgcccgcaggtgcttcaggcgggtcagcacgtccttcttcgggtccagcaccttctgggtggacttcttcacatccccgtggctccttcgggagaacatcccgcggcaggaagcccgggccccgccggcggggcagtaggcgcctgcgccacgcgaatcaaagcatagggtcgaggccggcgcgtgtcgcgcgggccactcgccgcccccagccccgctgctgccgccgccgccgccgccgccgccgcctcagctgtgtctccaggaaggaggggcgggccggtcacggcgaggggcggggcaggaaggcggtgtcgacggggaaccgaaggccccgccccgcgggaggtgccggccggccccttgggcgctacgcacgcgcacacaggccgaactctcctggcgggacactagcccgtccgcgccaaaacctagcggggacgcgctcagagggccgagaaggcgcctcgaatcacaaaggagcttctctcacgcacacgttgtactacaagtcccgagatgcaccgcgagacagtcctccaatcaggctggcggtcttcggcacgatgggagtcagtgggccggcattgggcacgtcgccccgccctgccgcgggccgcaagtgctcctgggaaatgaagttctccagcaggcgacgcgctgcgacctcttttccagggtcgcagaagcgcagggcggcctctgtccgtcccctgccccggcagcctagatcgcccgtggtttcactctccctcctgcgcgcccaccccattttcctctagtgcaacgtgaaccacacacgcccaaaaatctcagtaagaaaagtgtcaaggcttttcaaatgcaaactatttttaggtttagcttctggattcacacaagggagcgagtcgaagcccctctgaccgtgccgaaatcgcagctctaatttcacactaaaatgagttgctttggcactagggaagagcgtgccccggtgaggagttcagccggcccctaggttcctggaacccaacctcacttggggtatggaggtcgctcgctcagagggctccttgggatcttgcctctttgtaggaagggtgcgttctctgttgtgcaagccacatggcgatccagtagcagaaccagaaatagaacctgagggatctgactcaggcctgtatactttttaaagccaggcgcttattccctggggcaagactttgagctgaaagatggtcaggagatttcttacactgtaggattgtatagtggcatccgaatcctgcaagttttgacatcctttcagctttttcagcaagtacttaaggtagaatcacgtggtttccatccaaattgggacaacacaactgtctttttctcctctagctgaactgtaacttgagggaagagacaaggatttacacgcctttgtatccccatccctcagcacagtatttggcccatagggtcactcaataaaagtttattaaatgaaatacaataaaaagctaaagtagtcctacatatttcaaccaggcaggcgaaaaggaaaaaataaataaataaactcacagttttagagcgtctctctatttttagatttgtgtaatattcctttgtatagacacattcatacaaaggaatattactcagcaataaaaaagaacagactactgataaacccaataacatggatcactctcagacccggagatgaaagccccatgctcaagatgatggcagagcggccctaccagcctgagtccccagatgataacagatcaggaccacaaacttctaaaagtgtaacaagagagcaaaataatgtcttatcttaagtcaaggcattttgagagtcttcgttacagcaattgagcttgtacctgattacacatagtaaaccacaatgttcactgtccaattcctttaggagaagatacttttccttacactgattgaaaaaatagaatatacttgtcttaggaaactccatttttttaattgcaaagcaagctgccatcatcatcaaacatttattgagcacctgcaatgtgtaaggcatgattctaaaccctggagataaaagatgtataaggtgcatcctcctgacctccaatgcttccaatccagttaaggaggctgagcgattagatacatgtgggaataaatgacagtgtacagtgaacatgtgatactatcaagcttggtaatgccagaaacaggcatctgtgcatataaattcatcgcacccatcatatctagcctttacccagtaatgaaaatgtagaactccaattcttctcttaaaaaggaagaaacatatagtattattatgttggtactttttcacccacttgcatattccatatggctcttcttattttctgttgttctttctaaactcgttcctgctgggctgtgaactctttgagggcttcacttgctttgcactgaattctttatccctggagttatagagtgccgagtgttatgcagacattaagtgttgttgaataaatgtcctacagtaatcagcaaataagaataatgagatcaaaagtttaaaacttgcaatgcaaattaaaactactctgaaatatcatttgaattagaaaaaacaagcaaacaaaaaacctctacagagacaaggtgtgataacacactctagtctggtggcagagctatagaaaacatagctggtagaaatgttagatgctacaactcttatggaaggaaatttggcaaaaataaatatttgccttttgacccagaatttcaatttctttttttcttttttctttttcttttttttttttttttttttgagatgaagtctggctctgtcacccaggctggagtgcagtggagctatctcgccaggtccaaacgattctcctgcctcagcctcccgattagccgggattacaggcgtgcgcaaccacgactggctaatttttttgtatttttagtggagagggggttttgtcatgttggccaggctggtcttgaacatctgacctcaggtgatccatgggctttggcctcccatgttttgttgtttttttttttttttgacagtcttgctctgtcccccaggctggagtgcagtggtgtgatttcagctcactgcaacttctgcctatcaggttcaagcgattctcctgcctcagcctcctgagtagctggaattacaggcatgtgccaccatgcctggctaatttttgtatttttagtagagacagagtttcaccatgttggccaggctgctcttgaacgcctgacctcaagtgatccacgggcctcagcctcccagaatgctgggattacaggtgtgaaccaccacacccagccagaattttgacttctaggaatctaccctgcagatattctaatatataacactggaaggatttaaaaaaaaaccttaacattaatgcctacctaagtgggatagaggatgaggtggaaaggactcagtgtcctctctgagtatatctttttatatttttttcatttttgaaccatgtaaatgttttccatattcaaaaattgaaacagaaaaagacaagcctgaaaataaaaaataaatggaaaaaataaaactaacaatatatgtaattggtaggataactctatggagaaataaatataaaaccatgcatggaagtttattcctttcaccactatttataatagccaatgtagtgggttgaacagtgcccacccttccccccaaaaagatatgtctatgtcctaatccctgaaaactgtgactgagactttatttggcagaaggatctttgcaaatataataagatcctcagttatctgggtagaccctaaatccaatgacaaatgtgcttgtaagaaacaaaagaagtgaaaacatagaaacaaaggagaagggcacatgaagaccaaggtagagattgaggttatggagccacaaacgaaaagacccttatagccaagagaaactggaagaggcaagaaaggattctcccttggagtcttccagaggaagcccaacaccttgatttcagacttcaggattccagaaccgtgagaaaataaatttctgttgttttaagccacgcaatttgtggtaatctgttgcagccactctagaaaacgagtatgaccagataccagagagaaccctgtgattgtctaacaaggtacttatatacacatacatctataagtggctaatttaatccagttcatccacacagtgtagcactatggagtactatgcagctgtttaaaaataatgggaaaatttcgcgtgtactgacttgacataattttccagatacgttgttaaatataaaaggaacagaatattaaaaatttttttttcaaaaagaaacactggaaggataaataaaaagctaacatcaattcctacctaagtgggatggaggatgaggtggaaaggaatgaaacagggtcctctctgagtatacctttttatatttttttcacttttgaaccatataaatgttttacatattcaaaaattaaaatagaaaaagacaaacctgaaaatcaaaaataaatgaaaaaataaacccaaccgtatatgtaattggtagcataactatatagagaaaataattatttcaagtgatttttgaaaacagtattctgattgtacctccttagagggatgtattctaagggcaaaaagatctgcaaagaattaataattattattaagaaccaagattttcagtgtaagagaaaggagatacaaaaatatcacatcaaagaaaatgtgaaaactctgtaatactagattttacttcaaatatccatttgaactcataatttaaaaatacagcatgtgttggccaggcgtggtggctcacgcctgtaatcccagcactttggaaggccaaggcaggtggctgagactatcctgggcaagatggtgaaaccctgtctttactacaaatgcaaaaattagctgggcgtggtgatgcatgcctgtaatctcagctactggggagactgaggcaggagaatcgtttgaaccagggagttggaggttgcagtaagccgagatggcaccactgcactcagtctggtgacaaagcgagactccatctcaaaaaaaaaaaaaaaaaaaactaaacaaaaacaaacaaacaaatgtcatacatgaatgaaatgaatgaataaaaagaaggccatacattcttttctatttgctggacgcagtggcccacacctgtaaccccagcactttgggaggccgaggcagacggatcacttgaggtcaggagttcgagatcagcctggccaacatggtgaaaccctgtctctactaaaaatacaaaagttagctgggtgtggtggcaggcacctgtaatcccagctacttgggaggctgaggctggattgcttgaactgagagtcagaggttgcagtgagccaagaacacgccagggcactccagcctgggccacagagcaagacttcatctaaaaaaaaaaaaaagaaaagaaaaagaaaaaaaacagatatgcagttgtccaacaatatttataaaaagacttttttttttttttttgagatggagtcttgctctgtagcccaggctggagtgcagtggcacatctcggctcactgcaagctcctcctcctgggttcatgccattctcctgcctcagcctcccaagtagctgggactacaggcgccggccaccatgcccggctaatttttgtttttttagtagagacggagtttcactgtgttagccaggatggtctcgatctcctgacctcgtgatccatccgccttggcctcccaaagtgctgggattataggcgtgagccaccgcacccggcctataaaaagactttctttcccacattgaattaacttggagcattggtcagttatcaatcaaccgtgtacgtatctatttctggattctctgttctgtttcattgatccagttgtttaatcctagaccattacccctctgtcttaagctttattgaaagtcttgatttcaggtaatgtatattatctttgttcaagattattttgggtatctaggtcctctccaattccatataaattttagaatcagtttgcctatttccttaaaaaaaaaaatctgctgtgtgttcttgttcttctaatctctgtaagtgctagaagcaatcatccccagtggtaatggaatattggtttccaaataccattctccatcctaagtaatcaggttctttttttttttaatgaattaatttttaaaaaaagtagagagagggttttgtcatgttgcccagactggtctcgaactcctggactcaagcaatctgcacacctcggcctctcaaaatgctaggattacaggcgtgagccagcacacacacagccataatcagagttctttagaaaaatggctgattccaggtctggggcaaggaaaatacagggaatacataaaaaactgtactcaaaggtcaacgggaaagactcaaaacaaaggagtctatggccaaatgtgggataatttgatcgtcaaaaagaataatgactgtgattgattataaataaaaattcagtcctggcatgatggctcatgccagtaatcccaacactttgggagcctgaggcaagaagataacttgagcccaggagtttgagactgaactggacaacataggaagaccctgtgtctccataaaataaaatttttaaatgtaataaatacataaataaaaattcaggaatctataatgatattcaaaagacttttttttttttttgagactgtgtcttgctctgttgcccaggctggagtgcagtggtacgatctcggctcactgcaagctcagccttccgggttcacaccattctctcgcctcagcctcctgagtagctgggactacaggcacccaccaccacgcccggctaattttgttttttttttgtatttttagtagagacagggtttcactgtgttagccaggatggtctcgatctcctgacctcatgatccacccacctcggcctcccaaagtcctggaattacaggcatgagccactgtgcctggcctcaaaagatttttttaatgtactaggtaaatatttcaagcaaaggacatttcttacacctttgttgatttcagcagactttcatctggctaaaatcttttctcagtaacaagttggaaacttgatctgaactgggtgtgtactttaaggtcctaatcagccaggcacagtgactcacaccaacactttgagagactgaggtaggaggatcatttgagctcaggagttcaagaccagactgggtaatatagtgagaccccatctctacaaaaaaaaatttaaaatttaaaaaattagccacttgggaggctgaggcaggtggattgcttgagcctgaggtgcagtgagccatgatcccaccactgcacaccagactgggtgacagagcaagaccctgtctcaaaataaataaataaataaataaaagcaacaaagaaaaagaaaaaagttcctaaccacaggacaatgcagagatctgtcatcctctctcttcatcacataccagagaagcatcatgctttcctgataacaccaaattggatttgatctttcaggaaaacagtaaacatgacaaagtaagcaaaatgggatgagagatcaagaaggcctcaattcattaatcaattcttccatttattcatcaataaactcatcaatatctgatgttgtctggagtaaaatttcagattttttgtttttgtgtataaattcaaaccaatgaagagttattgaacaaatgccatagctaaattgtgatgaccatagttttgcattttcccattcttttctattgtactgaaaaaatggtctttcagggccctatgtgacaactgcaacttgggtaatctttgagattaaatatttatcaaacaactctacaattcattgttgccaggcttgcgcccatcacagcaccagagtcaacactcaatcaataattgctgaatgaaaaaattcattcacttacttgctcattaatatctcagtattgtaattagggaattacagttcagtacaatgttttcaaattaattaaagttttatgcacctaaattttaaaattctactcttcttttcctagaactttttctaaaatatgccttgggcttcctgtctgcttaagcaaattcgtcatttgtgaaaccataatttatccttcccctccccactccacccccctctgtctttttataaattgttgttactacttgcaacaagggagaaatgcctggtaggccctccccatctaatgtcaaccatctctttcccaaacactcaatcactgctatcacagacaatttgtttgcctttttaacttcaataattggaatcattctagatgcacagaatttcaagcactgtagtttccagataacctaaaagttactggatggggcacagtggctcatgtctgtaatcccagcactttgggagcctgaggcagaagatcacttgaaaccaggaattcaagaccagcctggacaatttagcaagactccatgtgtacaaaaaaatgaaaaattagttgggcaaggtagcatgtacctgtagtcctagttactggagaggctgaggtgggaggatcacttgagtccaggactttgagggtgcactgaggtatgatcgtgccactgcactccagcctgggtgacagagcaaaaatcttgtctctaaaaaaaaaaatataaaaataatttaaaagatcttgtggcatgtgtgtttgtgagtttctcaggtaaaacatagctaaaagcatacagagtaagtggaaaagaaagacgcaggctgaaaagagaaaaaagaatgtcccagaggagttcagcaggcttaaaaatattctccaagtagacagtgatgtcttaatgaaagacgtttaaggatagcaactgtggtggtgtccaaacattgacctaggctgggtgcagtggctcaggcctgtaatcccagcactttaggaggccaaggtgggaggattactcgaggccaggagttagagaccagcctgggcaacatggcaagaccctgtccctacaaaaagttaagagaattagctgggtgtggtggcacgctcctgtagtcccagttaccagaagtctgaagaaggaggatcacctgagcccaggagttcaaggctgcagtgaacgatggtggcgccactgcactccagcctgagtgatcgtgtctcaaaaaagaaagaaagagagagagaggagaaaagaaaagaaagaaagaaaatgcactgtcagctaaaagatgaaaaagaggacatgaaaatggaaactgagattaagagaaacaaaaagacttctagaccagaatggacagtacccaatatggattaaccaaaggcaaagaaaaaggacaaaggcaaagcaagataaaagaaaggggaaaagcaaaccaaatgcagtgaaggcagagaagggtttggcctggtagacccttaaaaacttggggctggggccaggcgccatagctcatgcctgtaatcacaacactttgggaggcctaggcaggcagattgctttgagctcaggagttagagaccaacctgggcaacatggtgaaaacccatctctacaaaaaattacaaaataaattagccagtcttggtgatgcacgcctgtagtcccagctacttgggaggctgaggcaggagaatcgcttgaacccaggaggcagagattgcagtgagttgagatcgtgccactgcactccagcctgggtgacagagcaagatcctattctaaaacaaataaacaaaaatttggaaaatgccatgagacagatgattgaggagaatgtatacaaatgcatactttgatttcagctcccaccaaatgaaaaccatttcttttcatattttaacttggccttttttattgaattcaaacccaatgtaactcctcaagtttgttttgggaacttgaataaaatattatctttggcacatgaaaatcacattgatattttaattggatgctactcagtattcaggtatcaagcatcaaaattctgtcaagtattaatgtggttgtaattgtccttacaactaagtaattatagtcaggaaacataaaacaatgatatactgacaaattttcttaactcagatttaaagaaagctgttatgtaagcatatcagttattataaaaagcataaaatttataaaaatataacattttgggaggccgaggcagacagatcacttgaggtcaggagttcaagaccaacctgcccaacatgatgaaaccctgtctctactaaaaatacaaaaattagccgggcatggtggcacatgcctataatcccagctactcaggaggctgaggcaggagaatcgcttgaacccaggaggtggaggttgcagtgagctgagatcgtgccactgcattccagtctcggtgacagggcgagactcaatctcaaaaaataataataataataatataacattagtggatcttataaacaatgcttgtgtggggttttgattctgtataattcagaataaaagatattttgtgtataaaaataaattttaaaaatacattaaaagttactgttttatttttcgatttttctttcatcggagagtttttttagcttgggaggatttactttttcagactgacaaaaatatcttgtgcttgcatgttaatcccaattatcatgaatattatgttaatttgagtgtgtgggaaaattccatttttagccagaaattttcctattggataagctcattgtgtctgtccttaggagcaagatcttttaggatgtcatgcatgctgtgtgtcctcatttggatgccactttgcaatctgattttctttttgttttttcttttttaaacaaggcctcactctgtcacccatgctggagtatagtggcataattgtagctcactgaagtctcaaaatcccgggctccagtgagcctcccacctcagcctcccaaagcactggaactagagatgtcagccactgcatttggtccttattttctataaaacagaaattatagtccaataaattcaaggtttttttcttgtatcagctttcactctgaaattttgacctaacatctcctcaatatctatgttgtgtccgagaatatatacctgcctaaaattcctaagaaagaaaggacgatgacgtttcataagaatgatacccttggccgggcgcggtccctcatgcctgtaatcccagcacttttggaggctgaggtgggcggatcacctgcagtcaggagttagagaccagcctgatcaacatggagaaaccccatcacgaacaaaagtacaaaattagccgggtgtggtggcatatgcctgtaatctcagctattcaagaggctgaggcaggagaatcacttgaacccaggaggcggaggttgcagtgagcctagatcgcaccattgcactctagcctgggcaacaagagggaaactccatctcaaaaaaaaaaaaaaaaaaaaaaaagagaccctaatgtctctgttttccagatggcactataactgtatacactgaaaatatatattatctccaaaaatatctcctattagtttattttataacgggaaactactagtttcttttctttccaaatatctgtcgagcaagaaaatttaatactttaaacttgactataaataattttatatgagaatatcacttaaggcagacttttaaaagtttttgaaaatgtactagccattttgatatgtctgatggatgcctgataacagagtaatgcctgagggaaaagaaaaccaatcatttttctaaatttattcaagcagatgtattcacagctgtacatttcaaccacaatgtcatctgctttggatatattttcattttttaatcatcagagcagtgtcagtatatcaacattgaatcatggatatacatcaacgttagaaaaatataaccccaagggtacataccatgagaacgtttataagtgaaaaaacatatctttgaatgataatgttgggaaaatcaggaatcatggaaaccgtctaagcaataaataagactgaatagaagacgattcacaaagtctagagaaagatgaagttacacaaggtgagaagcctgcaaaagtgtgttcattacctcacactgtccctggtagacaaggtgccaccattagatttaatattagataagatgttctccttgatttagaactaggtgttaggttttctaaaaacaaaaacagataatggaatatcaacaaaaactattcattcaaaatggagacattcatcacacggtttgttttatttggtaattcctataattttctagaaaaaaaatctcaaagtaattcttgggaaacatagtaattgttgggaaacataatacaataatacaaattttttactaatccacatatggatccacatatatgtcttaaattgagactctttttacctggtgtttcagacagaatccttagttgtaagcaacagaaactggctttttaagtgaaagacaattcactggaagaatgtcaggctcacaaaatcagtgggagattggagaaccaataattagaaaagtagaaactcagcaagctccaggtggcctggacacgtcacagaatatgctgtgtagtatcagcatactatagctttcataacaacaaaggacccctagccatccctcacatcctcaaattcaaagtctcaacaaagaatgaccagttggctaaatattggtcagatgcccagtctatacattcaccctgctggctgccatgggacagaaaatctgaggtactagacccctttgtagtaggaggtgggcaccacttccaagcaaaactatacaggataggaaatcccctacctcccaaaaatggggagttttgttggaggaagggcttttggatgctgaatagctaaaataacagcaacaattacaaatcaatacatcttccacaaagcaataaagagaatggaatccttattatttaccattcacttggcataaattaatgtctgtcctggaatatgggaattgcccacttaatcgggctgatttataattaagatcttgtactttagtaagatgattgaaatacatagtttactcctttcagtaaatccttgagcaagaattatatttgatagtttttttctgaattttaactgggaaatccctgatgttacttatacttagggtatatatgaattatgcaaatattagactcatcatagtaaataattggaaagatgtggatcatatttttaagaatttacgaattcatatgtcacagagcatcactaagacattcccttgacatcttcaaaacactgcccttcaggaacctttctctttatattattcttctttgtctgttcttatttttcttcttttctctgaattgagctttccctttataagccaccctaatatttatcactttttattgtccttcttggcaatctttttgatccagtcagtagtcttgagtccctaccctgtgctagtttcatgcatggcaatgaagttataaagatcataagaatacggccccaagccccagagacaccacagtctaatagaggagacattcacagccctgacctcagagaactcacaggccagtgtaggagacagacacctaactaaataatagtaattaacaatagcgacatgtacttggcagtataggagagaccagggagaactgggcagtgggaataagaggggagctcagagaaggcttcctggtggagatgacacctgaattggggaaaggagctgaatgcacccaaggtcaaggcaaggaggtgagatgcaatgggctctgtgaggctcaccagaagcagattggttttgtgtggttatcacccaggtttgtgcttgtggctgtattccacgtactacaggggttacggaaatgtgtatgtgttcttgtagccctgtgaaaacagaaagaacagcagggccaaatgatcataaaaggcaatgatgccaaaatggggagacaagtgaacttccctggaatgtgtggaaggcaggataggatgacagcagacctaaaggctccaattcccagtcttttcccattactagctgtgcagtgttcaatgggtgactgaattctccaagactctccaagactcagttttcctcacctataaaatggagataaacctgcgttgggctatttattctatctaaggagtaaatgagcataaaaagaattgaacacaataagtggcacaaaaatgttcaatacatagggttttttttcctactctccagaaaattagaacaaggccatttctgtttgctaagattgctcatttgtgtgctcacttgatttttaaatgtgttgaatgtgaaggatttacacacctgtggtttcccgtggttctgcatagctcatactggacaccatcagaacaagtcaaggcaacgtcccagaacccttgattctccacttttgttatgtgcactctttggcaaggaggggcactttcactgatgccccattatatgaggtgaaatatccccttctttctggaccataaatgtgaagaaagctggccaaggccgggcctggtggctctcacctgtaatcccaacactttggaaggctgaggcaggaggatcacttgagcccaggaattgaaagctgcagtgagctataatcatgccactctactccagcctggacaacaaagtgagaacatgtctcttaaaaaaagaaaaaaggaaagcccctcatttgctttgcctgtgtaattctaccctaccccatgccaacactggccatgatacagcctaggttaaatgattttacataattgtcaagagtattagcaagaacattctggaatcatagaaggtttcgagagtggaatgcaactgacagatgtagtcctccattgtaaagagaaaaagtaaccaaagctggttagtgactggttgttcccagaactagggaggaaaccacttgcctggctttgccatgatgcttctggcctcattaggatggctggaaaatgccatcacatctgaatgccgttttgtaaagcagttccatgcacttatttcaccaacactcagaaaagttgtatggctggcacaaggtcatccagctcacacaaggcaggtaaaaagacaaaccagaacggcacttggaaaagcaggaaggaagtaaatacatgcctcagtttgtcctctggaagctggaagtcaagatagaccagttcagagagagtaggaaaggctcctgaagaagacgactggataaagaaaatgtgatatttatgcacaatagaatacgatttagccatagaaagaatgaactccaggcattcatggccacagggatggaactgggggacatgatgtgaagtgaaataagttgggcacagaaagttaaacaccgtatgttctcactcatatgtggaagctaaaaaaaagatctcatagaagtaaaaagtagaacagaggatattggaggctggaaggacagagggaagagggggataggaagagatttgctgaaggatacgaaattacagctagatagcagggataaattctcatgttctatggtgctgtacgatgactatagttaacaataatacattagatagttccaaatagctagaaggaggatattgaatgttcccaacacaaagaaataataaatgtttaagatgacggatatgctaattactctgatctgataactataaatatatgtattgaaacatcactatgtaccccataaatatgcacaattattatgtgtcaactaaaaaaaattaaaaagccaaagtccttacaatgaccaacaagacttgacatgatctgatgtcccattaccctttttttatgcttcaatcagttgaatttcttttaaaaaggggttttttgtttgtttttagagatggggtctcactctgtcacccaggatggagtatagtggtgtgatcatagctgaccgcaacttcgaatttctgggttcaagtgatcctcccaccttagcctccctcctagctgggactacaggtgtgccactatacctggctacttttttatttttcttttttgtaggcatggggtctcactatgttaacgagtttggcccagtatatttttaagtgctttttgttcgactagatgaatcagaagtctatttctcaagtcaatttctgacctgcctgtttcaagcatgcctggtgcttttcctgtggatattctgtttactactctatacataccctcactatcctccatggagacaaactttgggttttctttccttgctgccagcacttcaactattggggcttcttctactctctgcctctacctctggaagaccattcttcctcccctttgccagctgcattcctgctcgttggtgggaaaagcaatccctgtcaggccagtcagcttctgtaaactaaaatcatttgatcatgtagacacaaggctagtatgatattaaaaggaatgagccaaggagtcacaggcttaaagaattttagaattggaaggatgttagagataagttaccggatacaggagatgagtctaaggagatcagtgttttggttttttgttttgtttgttttgttttttgttttcatttcagatgcctgaggccacaagctgataccctctgtgtttcaactacttattgctatgtaacaaactatctccaatcttagtggctgaaaaaaacattttgtttatttgctcacaatcctgcaatttgcaaggcttgtctgggacagttcatctcaggtttacatggctgatgtttgactggggctgaagaatggacttgcaagatggcctcactaacatggctggcaagctggtgttgactgttggcttgaagctcagctggggctgttaaccagtggcctcacttcctttctgcttggcctctccacatggctagattggacttctcacagggaggcagtctctggatattcaaacttcttacatggtggctggcttcttctaaaatacaaaaatgaaagctgccaggcctttgtaaggcttagaattgaactggcaccctgtcacttcctccatgatctattggttaaagaaggtcacagaaccagcccagattcaaggagcggggaacaatccaaggacatgaatattggtaagtgtgattcattgagaaccatcattataaaaaattagctcactaattttcccgctttcaccaaatattgagcttccactgaaattttcaggccagcaaataatatggttagtcgaacattgtcctaggagacacctgagcttttgacctagcctggttattaattagctttagagacttgaagccatctaaactgtaagttttctggcctggatgaattttcatgtagcttctagctctaaatgcagagtcctaggtatcagttggtcttcagttcctagatgaagctttaaaaaaaagttggggcatatgattttactatattggattaaacaaacctctgatttttcagtgcagtcaagctgtataaaagctcaactgtgtctctactaaaaatacaaaaaacactagccaggtgtggtggcgcacacctgtaatcccaactactcaggaggctgaggcatgagaattgcttggacctgggggcagaggctgcagtgagtggagatcacaccactgcactccagcctgggcgaaagagtgagaccctgtcttaaaaaaaaaaaagttcatttggggctggacactagggctcacacctataatcctagcactttgggagtccaaggcaggaagatcgctagaggccaggaatttgagaacagcctgggctgcagagcgagatcctatgaggcatgattgtaccactccattccagccttgatgacacagcaagactctgtctcaaaaaacttgagttatttgagataactcaagttattactaattacttgcagctggcagggaggtaggaacatggatggagtctccagaacagttgggaagagggcgtgtccgctctctgtgccactaaaacgcagccacagaacttcattggcatacaccaacacacatttattcagctcatgagtctatggggttcatctgatctgggttgggcttggctggtcttgactgagatcacttatctatctaggagttcagtagctattggctgatctagggtggccttagctgagtgtagtgatgcacacctgtggtctcagctatgaaggaggctgaggtgggaggatcacttgggctcaggagttgaggctgcagtgagctatgatcatgccactgcatcatccagcctgggtgatgaaacaagaccttgtctccataaaaaaagaagaccattaattaatcaattaatcaatctaccatagaaaatatcttgtaaaaaccaactttgaaaatggacttgttgagtgagctttttttttttctttaaacagagttttgctctgttgcccaggctggagtgcagtggcacgatctcggctcactgcaacctctgcctcccaggttcaagcaattctcttgcctcagcctcccaagtagctggaattacaggtgtgttccaccataaccggctaatttttatattttagtagagacagggcttcaccatgttggccaggctgatctcaaactcctgacctcaagtgatccacccaccttggcctcccaaagtgctgggattacaggagtgaatcaccgcacccggccaggctgttctaatatctcacgattgcagttcatgctgtctgtgcctagccccaggacacatatgcagagggacgtgggagtgggcttgctgagtggaaaacaccaaatccaccatagtggtcacctccgatggtgaggagggccattagtgggtccttgagagaatgtaattgtttgatgggtgttgatttcatcatttctgtccttctttgtatgtccaaaatgcgttgttcataatttaaaaatgcctgaatacactctggctttgaatcggcccagatacaacccttttctggctctgctttactgtttttacttgttaagagtttttctcaagcatgctggagtgactgatgcctccaagaagcacatactaaagaaataccgaattcgttttctgcaaagttagcaaaaccatcaatttttaaaaagtgttgtttaatctgtggccaacagaaagtttttctctgactttaggtttttttctttctccccagctttaaaaaaaatccattttcagaaaagtgacttatataaacagtccccacctcggagaattccaggatatgctttatccactgggcactaaaaccaagaaaactgatctgggtcatttcaggcttccatcctttgttatttcaagtcaataaaaatagttgggaggaaggtgactcaggatctggcttgctctgtcttcttgattaaaataatggcagattaatttggcttatttgattcctttttatctctttattattcttgctggaaattagataaaatgaccattattcctttctcacctccaatcagttgacttagagcaaaaaaaaattattttcaccagattgatgtgattgcacacaagatttctgaattagatagccctagttttccctcacttcctcaccaaaaattccacccatgaaggtatatttcaaaaatagaaagtgaacacaatgaccatgtgagtttccattaagaagaaagagggctatgattcagcggttgtgcaggcactgattacctaatcaaggccgtaacaactgctgctatttagaggtgataccctgaatcataaaaaattttctcttttgatgttccctctactttagaaatctcagagtgttttaaaatatatatgagaacctcaggtacttctatcaatagtaatcaacagtctgtctttactcagtagaaataatatgtaaaaaatactaatagctaaaattcataaagcccatcatatgtgtgaattactgttacagttttcatggatttatatacagaaaggctctgctcctcatgcagagataaaggccatcagaagatcaaataagttagaagaaggaggcaaaatacatccatattcttccagaaaagagaaaagacaaaaattatcagctgtttttgagtggcttggaattagaaacgatcctggttcttctgcttcagagcaaaacaataagaaaagataggtgaggagccaccagcgtggatgctttcagaatctaaattcaaatgatactttttctctagcaaatcaccaggttctgacatgactgactgtgattcttggcagaggatcaaaccttctgctatgaaaccccagtgagaggtgaaatcccagggcaaaaccccagtgtggggctacaaaaagaaaattggttcccctccgggagggccagggtctggctttgagcaaggcaagccaggcacctagggcgccagatttgaagagaagtaggtaactcactctcatggctgtgcaagggctgacctgcagaattgttccaagtccgactctgagtgccagcaaagtgaagtttccctaaagtattaaacctggagatcccaggggtggagatgaagctgagcctgggtctggaaagtgcttggtggtgggggcatcagtacaagggcacttctggcatctcccgttcatctcaaatgggcctgcatagggaaagttattacaaagtccattctcagccaggtgcggcggctgatacctgtaattctagcactttgggaggccaaggcaggaggattgctcaagcccaggagtttgagactagcctagggaacatagcgagacctcatctctacaaaaagtaaaaaaagtagccagacatggtgatgcatgcctgtagtcccagctcctcaggaggctgaggtcataggattgcttgaacctgggaggtcaaggctgcagtgagctgtgttgcaccactgcactccagcctgggcaacagagcaagaccctgtctcaaaacaaaaaaaaagcctattctcaataatccaagggtaaaacaatgagataaagcaatacctttataaagcaatacctttcattgcaaggagggagtaaaattgctagtgtgtatgtggagtaaaacagagtaactctatcagttaagacttttataggattacagtggctcatgcctgtaatcccagtgctttgggaggccaaggcaggcggatcacctgtggtcaggagttcaagaccagtctggccagcatggcaaaaccccgtctctactaaaaaaatacaaaaaaattatctgggcatggtggcgtgcacttgcaatcccagctactcaggaggccgaggcagaatatcacttgaacccaagagaaagaggtttcagtgagccgagatcatgccactgtactccagcctgggtgacagagtgagactacatatcagaaaagaaaaaaaagacttaaaaaaaaatgtaaccctgaagaaggccaacttaagctgctgtaagagagaaaagggaatgtattaattcatgcaactgagatgtccaggaagggagttgactttagggtgcaaggctgagctcctactgggcctttctgtagctgactcacccctgggctcttcctatggcaggatggccaggcagttcaggggctcaaacaagaaaactgggttgaccttcactgggcccctgccaatcactgtggcaggtgatggagaaagaccaagacacttgtgagtgggtaggggacaagatgtccctaaaggagaattggggactgtcacaaaatacagtgaatgactggtggggagcaaaaagccgcaaaaggcctctgcaataggagaacaaatgacaggtcaaatctggctcttcacaaactacttaaatgccgccattggctgtactgaatgccaagaaaacacattttctgataccggctacctccaagttggtgggctggggagatttttgtgtgagaaatgtttttaattgtatcttcttgctgaagcatctaaaacctgccagagaggagtgacaaacattcagttaccctgcctgctgcttcctcttttacacaagtatatcatcacttcatttcaggaagggcaaacacttttgtgttagaaaattgcctgataaaagggcttcctccattcactaacctcttggcagaattgtgaccgcagacctatggaaagcatgcagaggaagtggcgtttgaatgccaccctgcttaagggttttcatgcactcacagaaaatccccagaccaaagccctaagtcatctctacttacccagagacacaaacaggcctttccactctccttaatgctaatgctttggaaacactgaagcttcctgcaacactttttgatcattcactttccaaaatctgaatcaacacttctaaggtaacaaagggcatctgcgggttctttttggctttggacaaagtgcaacttcagctactagtttcaaaaagaaaagttctagtgctttttgcctgaaatatgtaactaaatggttgttaaacctacagtaacttattagaaaaatagaagtaaaccatttatagcaaaataaattctggagatggtaaggaatgaaatgtaaaaacaaatctttttttaaaactagaaatacatgtgggcaactttgtttaaaagcacagtaagttacagtctgacgacaaacgagaaaaatatttgcagtagatgtgatagaccacatgtgtctatttctagtgtatatcgaccttaaacatcttgataagaaaatcaccaaatttctaatagaaaaatgggcaaaggttttagtgatctattgtactacatggtgaccacagttaataaaaatgtatagtttaaaattgctaaaagaataggtttttaatgacctctccatgcacaaaaaaatgctaagttgttgaggtaatggatatattaattagcttgagtgaatctttccaacaatgtacacgtagatcaaaacatcacacgtaccccaaaatttacacacttttttgtcaattaaaaatagataaataaataattttaaaataggcaaaggatataaacaaaaaaaattgatggaagaaatacagaataaatctaaccagcaatgaattacaaattaaacaaaattgggatactattttttcccatcaaattagcaaagggctttaaaattaatagttgaatgagatgctgatataatactaatccaaatataaattggaacagcctttctaataagaaattcaaataaatctgtatccattgtccctataattttctatgtaggaactatcctaaggaagtatttttaaattttttaaaatttgaaaaaattgaaatatatgcatatttcatcacaacattatttatatgcagatatcacagcactgcttaatgatatcaaaaattataactaacttaagtgtgtaataagaaaataagattatagaatattcattctttggaatatcatgcatgcagccactaaaattatttatgactcttatcaagacaagggaaatgttaatatcataatgttagatttaaaaagaaagaagagaaaattgtatgtacaatatgatacagattttacaacttcatcagcacatgaatgcatctataattctacataatgcagaggaaagaaaacacaaccccaaaatatatacctggattttatgcaggcaatgatttttatttattttcaaggctgtggaatcactacatgagcatgtattacttttgataactaggaaaaaaatcatttaaggtaaaacatatgagaacttaaatagaattctcttttaaaaaacaaaataagtataagggtaaagcttggtaacttactaccgtcctagatctttgagttctttgttaaaatatcttccttttcaagcctgtacaggtccgtaaagaaaatgaaactttcaatcagcttaatagagaagttaggtggacactaagattcatattaacacctgctgacaggaggtgtcatgactaacttccaacagggtaattagtgtctccacctccttaataagtgcccctgtagtatatgctgatcaagcataaccagatcatcctaaactacaggagcaccatatggttatgccgcattcactctttttctaggggagttaaggagttcaccggcactaaggctgtccggggtggctctttagttctccctcaagtgggtttactaccatgagcgcctatcaaggatctaagctgtgtgtccctatgacagcttagctaggctggaccagggtcttagagagaatcaaactcttgtttctaaaatttagggagtggggaggtaggcaagatcaaatgctgtggcctgtccccagagggctatgacatatgagagaaaacgtgggattagaagtggcccattccatcagagacagagagagcctaaggtgtttgttcatgtgcaattggacgaccccccttttcccagtgtgtcttatctgggattctccccaaagacagaccctgagagagattcagatgcaagtaattgatttggaagatgattgcaggaagcacagtgaagaatgggaaactgaccagggaagccctacataagatgtgtcagtgagcaggttgtcccgtgggcaacaggagctctatcccactggagaccctcaaggaactgtgtggaacacaactcattattgccctcctgaggggcagggaagctgggatatttatccaccaattccttccctcagtggctgaagtttgtgccctgtgcattaaatccaacttcctggcacttacaaactgccccatgctgggtaatcaccttccatgccagaaaatgcccttgggcacaaaggtgccggaagctatttcaggaagctgtgggtggcactgtaggggactgtctgcagtggatgctgggggagacatgtagcatctgttacttcaggctacttgagagtgcttcccctgtgacctgcccccctggttttctccctcgggtacatcatgtattatgtactcttggagagtgattctgtagctttattaatccacccattgactaacccattcaactattttgattgagaaggatgagagaggtatgagaaggaaaaaataatgcagggtcctatctgaaagtgttagagaatcggaaagcgagcgagacttcaagatgttaccatgtgaatagtttgaaaatctgctttcatatagcaaattgaaatgaagagactgatcatgtagagaatagacaaacagaaatgtatcagaagtgcaacagaatttaagttatgcaaatccacttatatcaaatcatgtcttaaatgtatagggagatggtatttagtgaaagagtcagcttatttgtttctatttttattgtttttgagacagggtctcactctgtccccaggcaggagtgtagtggcataatcatggctcactgtagcctcaacctcccaggctcaagtgatcctcctatctcagcctcccaagtagctaggaccacaggcgtgtgccactacacctggttaattttttatttttattttttgtagagatggggtcttgctatgcttcccaggctggtcttgaattcccgggctgaagcactcccccttacctctgcctcccaaagtgctgggattccaggtgtgagccactgcacccggctttcccatggatgtttctggtctagaacaattattactatgtgtcttgctaaatgatagttttccaattgcatcattccttctacatttattaattgggattctgttgccttccctctcccgtttatttatttattcaattatttatttgtatcagtatggactcataggaatttattttattttatgggttttgatccattgtcatcattatttatgttgtcactcaaaatgttccacaccaaagagccaggttttgtcttttttttttttttttttttttaagaggcaggatctctctatgttgcccaggctggagtgcagtggctcttcacagatgcaatcccactcctgatcagcacatgagttttttcctgttccatatctgacctgggccagttcactcctccttaggcaacctgatggtcccacactcccaggaggtcaccatatcaatgccacacttagtgcagacacccgatcaacatattgcactatagcccagaattcctgggctcaagcgatcctcctgtctcagcgtcttgagtagctgggactataggtatgcaccagtgcacttggcagagttaggttttaaaagtgtatttgccacaaagccttcttattaggccctagaagctgtgtgctttcctggcccttttcctacaaaggctccaccctgaagccagtaatccaattaagaaactggcaaatgaaaaaccttacaactactggatcttctgtctgtctgtctgtctgtctatttatgtgttgtgtgtgtgatatttatatataaaagagctctaattggcttagaaaaaataagcgcttatatcatattttgtcagaaaaatagaaactttaatgcctcttattcacatgactttagtaacctggaaataaagacagttttaaagattattggtaaaattaaaatgtcttcaaaatgtagacatttggtctaaattaaagtcaaacatcagatttgcctcatctctcaacttatacaaaaatcaactcaagatggagcaaagacttaaatctaagacctaaaaccataaaaattctagaagataacatcagaaaaacccttctagacattggcttaggcaaagacttcatgaccaagaacccaaaagcaaatgcaacaaaaacaaagataaatagatgggacttaattaaactaaaaagcttctgcacagcaaaagaaataatcagcagagttaacagacaacctacagagtgggaggaaatcttcacaatctatacatccaacaaaggactaatgcccagaatctacaaagaactcaaacaaatcagcaagaaaaaaacaaacaatcccatccaaatgtgggctaagtatatgaatagacaattctcaaaagaagatacaaatggccaacaagcatatggaaaaatgctcaacatcactaatgatcaggaaaatgcaaatccaaactacaatgtgacaccaccttactcttgcaagaatggccataatcaaaaaattttaaaaaaatagatgttggtgtagacttggtgaaaagggcacacttttacactgttggtgggaatgtaataaactagtacaaccactgtgaaaaacactgtggagattccttaaagaactaaaattagaactaccatttgatccagcaattccactcctgggtatctacccagaggaaaagaagtcattatatgaaaaagatacttgcacactcatgtttatagcagcacaatttgcaattgcaaaaatatggaaccagcccaaatgcccatcaatcaacaaatgaacaaagaaaatactacttggccataaaaacgaaggaaataatgcaacctggatggaattggagactattattctaagtgaagtaactcaggaatggagaaaccaaacatcgtatgttctcactcataagtgggagctaagctatgaggacgcaaaggcataagagtgatacaatggactttggagacgcagggtaaagggtgggaggggggtgaaggataaaagactacacattgggtacagtgtacactgctcgggtgatgggtgcaccaaaatctcagaaatcacttctgaagaacttattcatgtaaccaaacaccacctgctccccataaacttattgaacttttttaaaagtatatttgccacaaaaaagctgtgtgacatatttccaagtttcctgtggtttacacaaagaagcaagtctcttgaaacattgacataaaatggcactaggattgtcctggcagtgtaagttatcagacagaacaattatatgctttcaaatccaagagcaagatttggcaggaataagttaaaagttatatacgaactcttttttgtttgcataattccctctgtgcttctcctgcctttgacagtgaagctccggcccagtcagagcattggcttagcagaagtcataaacagttcccaagctgctacttaatgtacagggctttggggtattgagaggtgattgtggtatggaacctagcgtgacctggattgggagagggaattttacgtgcagtgtcctcccgggaagacaacagttaagtgtagcatgttacactgtgttggatgaaacccaaatccagtctgtggtttgacagtttcagagtaacctacaatgtgtggcaatatgctgaaattacttttcaggacagaaagctggcctgagaaagagactctgggctccaaactgcttgtcacaggaaaataataaatttggacaacatgcaaagttcaaatcacctgggtatgatataggggacagggcaggaccaggaagatcacattcagagtgctttcgacaatgggctccagaatcacaaagcctggatctgaatctggagctttgccacttatgaacttgggcagatactgaaaccctctgagttcagctgcctcatcttttacatgggcattttacatggtgaggaaaagagaagctatattatgctggtatttctccacttgctttccctgagtccactttctgcctttctctgtcctgttctgtgcccaggagactgacctctcctgtcagaatcccccaggctcccctgcctgccagttgggtgtggccaataggagctgctccagtgagattggaaggtggcacaaaagcgaggtcagggatatggatgcctttctccctcccagctctatctgtgcacaccaccttccagcccagcctctgcatgtagctgtgttcctttacagccgtgttcttggcaaatggctcctcttctctgactccagctctcactagactatctcttccctcgctccttcaggctgttgctatttcctgggagcttcaccgtcccttagccctaccctcatgtctgtgaatgtccttcaccggcctctttgagtgccacttgttacctgctgtggaggcagacacatgcagcacagagctgctgggagaattaaatcaacgttcctctgaagcacttggcatgtgacccagaacttcagaggtgctttggaaatgtgaattgtgggtgctgttatcaaagcatctcccattgtccttggaggcctcactggtgggtgacaaatgcagggtggatttagaaggaagcgagggagggtgatgatcttggagcgtcctcgtataaatgggaccaaagcacaggatctcaaaagcctgtgggattagaggcaacattgtaggagctcaatcccggcactctgggcactgtgtcaaaacaattagtgcaaatagagtttggcatggagtggggagacttaaaggtgacagggcacaatgcataacttgatttatgaagaaaagcccaaccaagatgtttagaattaaaaattcaccttctaatgcataccttagaatcatgttgtctttattcttaccctgggacagtggaaaatccagcagaaaccaccaagtagaggcttctgctctctaaaatacacaaacacttttagtaatcccttgctagatcaacttagttttccagaaacactttttgggagatgatcttatggctgtggtaataatgggcacatggaaataagatgtgtgaaacggccagccctcagaaagccttagtgtatactgggcaacagaaaacaaatccacatcagtcacctgctgccatattttttcaacacttggtatggaatgtgcgtatatttgcagtgtgattgccatgtaagatatgacaggattgaaaccaaatcactggtacaagtcgtagggtctgaagtatcattcagattcactagttttaaaaggagtctgggcgcggtggctcacgtctgtaatcctagcacgttgggaggcctaggtgggtggatcacttgacaccaggagtttgtgaccagcctgggcaacatggcgaaaccccatctctactaaaaatacaaaattaggtgggtgtggtggcaggtgcctgtaatcccagctactcgggagactgaggcaggagaatcgcctgaacctgggaggcggaggttgcagtgagctgagattgcaccactgtactccagcctgggtgacagggcgagactccgtctcaaaaaaaaaaaaaaaaaaaaaaaaggagataatttagcattcattaaccttgtcttggatgttgtggcaggggggcgggaaatgcactcaagagaccctctctgaagacctggttgacttggttgggagtgggggcatgatgactgaagctctcttttctgccttgtccttgtttctcagctgtatttccggaactggagcaagaatcagtgttgagaggtaaggggagaagttccgtaaagatagattcagcatctcagagatttcaaaggaaggtcacctgtttgtttgccaaggtagggggaaagtaggactgcacaaaggttctactgaaaaaaaaattatttaaataaaggtgaaaaattaccacccactcactctgcttaccttgtgtcaagcaggaaaccaggttcatggcagatgacaaacacccagttttctgagtcagtattctgtagtattcttttatttttaaattaaaatcatgaatagtcatgaatgaagggacttgattttaggcctttgaggggagaaaaacagtcaaccatatgtctgagttttaaaaattgtaacatcaaaggttttgaagaaagtttcagagagagaaagagagaaaatatagatagaaaacagtttcctgagtagatgtgcgttttaattttggcttctggctcagtctcttagcagttataggattaggatttggggcaaattctttctcttcgcccaagtttcctgaaatgcaccatggggacaatgataaaggctcgctctgggtgcaggaagaatgcctaatgtggctcggcatatagaaagggctcaatgcataatcccgactatcagtgttcttgttgctgctatggttacagtctcctccccccatgttaactgtagaccctctggccctcacattttgagcgtcaccacgctgccagtaaaggaaatggcctgaaaccctgttctccgatattgttcaggacatagtagcctgtactcactgcctgtttactcaagcgaaagggctcagactgcttcctctaacggttgcagagaagggctgaagctttgtcagctgagcctttgagatctggctggctgtgaatgaataattaaactcctgccaatgcaaaggtactgtgtaaattccttaaagcggcctcctgttttctctgtcgtgctcctggctcacccccgtcatccgatgtgttgttatttagccagaagcctgagtttcaaggctcagacgccaccctttcccttgtcagctgtttctcaatagtagttgtgtgttagctttgccagggaggccctggccaccacagacccggctgagaggggctggataggggcccactcgagctaagtgcagccagttcctgtcttagcggattgcaggaagagccactccagcagaacacaaaacagaggagacagcaagggccttttctgcatattgataccctcatggaaggagggaaggagagccacagtcctgtggaaaacttggcctatttgtataacatcctgctactggagggccagaattcatgggtggagaggtactttaaaacaaacaaagagccactcctgaaagtgtgctaggattgaacagaggccaagtcaaatcccagcgtgttcaggagacattaagtgtgtttcctgtctctacccatcagcggtgccataaaatatttctccaggatttttgaatcctaggatgactggttctcagcacagattcccaaagctcagcctcataggccgttcaagtggaatcacacacaaatagctcagctgtgcagagaaaagagcgcctcttttattgtttgaccttgatcctgagcctcctcccacctgcgagcaagaggaaacaattaccttctaaatctgccatctagtcatttaatcatcctatgaggcaatgctcagtctttaagatttttgtgtgttctgtatctttcccagaatgttttgcaagatggcttttggctggatgggagatcaatggcttatatggcagagaagaaaatatggggtctgccatggcttggacatttgacccctccaaatctcatgttgaaatttgatccccagtgttggatgtggagcctaatgggagatgtttgggtcatgggggtggatctctcatgagcagcttggtatcctctttgaggtaatgagtaaatttttgctcttttagttcccataagagctggttcttaacaagagcctggcaccacctctctctcttgctccctctttcctcatgtgatctccacacacactggctcctcttccccttcctccatgattggaagcctcctgaagcccttacgagatgctgatgccagcacaatgcttcttttccagcctgtagaactgtgagccaaataaacctctgttttctttataaattacccaggctcagctattcctttatagcaacacaaatggactaagacaggatccttggggatggtgtccttcagcctcctcctggggcgatggcccttatgcctctgaatcctagctaccttgctggtcttttggccaaccgtctgtggctagagaactcatggtctgtctcatgcccacagggattggtagccgacttcccgtgactgaccagcctctcattagctctgcctgactgcagaccctccagccctgacaagtcctccagcagctcgttggcctgagcacccactcctgcctctgctaaggtatcaccccttcccacttagcaggccccagggcagtccttgactcagagccggagaggcagaggacccatgaggagcctgggaaaactacctcagggcttcccctccctagccacagtgatgcagctgagaccctggcacaagtatgtgagtgcaagtagtttatttgagaggtgatgctggaaaatgtggtagggaatgaagaagcgaacagggaaaggagacgccattagagcttacattatcaagcaaattgctactgtgagcacctggaacttaatgccatccccactcctcccgggaggactctgggaaaccatatagaacatgtctcagaattgtgggcatgttaataactcgtaaagttaactatgaaggttaaatggaatttgcatgcaaagcagttagcatacaacctagcacataagggctcaggaatcatatgctgttccttgttccccacaaaacctcctgccccccaaactccttcttgccagttctttccatggcttctttggttcttaatttttcttagattttctcttatggctttaaccacttctttctgtctttcacccatttttatttttactctctgaactgaaggcaggtatcccccaaggtccaggcttaagcttttggctttttccctgctaagtgaattcttccacatacagagttaataggaaaaaaaatactcaagactctttgaacacaaatccatagaagtacccttgggatatatgttccatcccacccccaggcaggggacagacactgtccatgttaaaataaaactttgtcatatgaaacgttttagaaagtgtagtagaaagagatggatgaacatttataagtttggtaatatgaaaggttgtaggcactggggtaggtgagtagtctcataccatttcagtggtgcgtgcctgtagtccagctactcaggaggctgaggtcagaggactgcttaagacaaggagtttgaggatgcagtgagctgtgatcgtgccactgtcagcctgagcaacatagcaagaactgacgagagagagaggagagaaaacagatagaaaaatgctgataccagataaggagaaaagcagggagccttctacttgattaaaagcttgaggttgatggaggttttttagatgctagctgctaattgagagaagtggaactgagagagatgactccaaattccactacacaggaaaaaaaagataaactgggagcagtatctatgtccaagtcagaaaaagaggaaagaggaggagaggagggcctcattcctcctgagacaaccttgtgggaatgggaaaggagcaggagaatgacccagtctgaacgaccacttcagggctcagggtctagcaggttaccaaaagaggtgtgcataagggattcttgaggctttcaactatctctccacctgggccagatgtctgggatccacagcttcaaattcatttgaagctgaatgatgtgaatcatactgggaagatacctgggaaatgtaaccatgctttctcagacctagtgaccagcactgttcatgctgagtggtggagatcaagcatacattagggagcttactagagaactcagaagaataagggcaacaggcagatctcagggctccctgtaccattcctatgtgacgtgccttcctatcctgccattttactcttaagatagcaaaaagcaaacacaaggtggtctggggacagagacaggcaccacatctacactggcacaggacatcaactctgaacgaggaacttacactttgatgttgccttgccgaacttctcaccccacctctaggccctttcagattttcctaccagagtgctctgtgtcaccttagactcagtctatgtgatattcagcttctttcccaagccagcctttccttaccatatcaatctttctgttgtttgctccacaatttgtcaaaattcagatgagtcacttctaccctagcctttctctttttcttctcaattgaaactttcattaaagcctgtctcttctgcctttgaatttttctctgagtcattctgtcttcacattagcatccagcagcttagataaggaagcccgtactgtttaagagacctttcctcccctccagtcttaccctgtccattgctttctgcactctgctgtccatcatcccagcccctcccttccccagagcctacagcaacttcccactggccaactttagttgaatttcccatattggagaaatcactgctccatagatttttttcccttcaaatggtctcatatacatcttttccactgtagtcccctttaatcccagcactcatcacctgtgcacccagttaccattggcctccttggtttcaatttctccactctaccctacattccactcctgcaagaatcttgcttaaacatcatttcaccaagccacacctcagctcaagagtgcacggtggcttacagcttcatatcacatcagatctaaactgattgattgttatcacctggccctgaaacctaattttcccagccgtcctcaccttttctctcgtccaagctgagtttccctcaaccctctctgttctgcaagcatcctgttcttagtcctagttgtatggcattgcttagccctctgctcagtcaaagacgtttaacttcttaagatctatgggatcttttatgactatctgtccactcccatccatgctctatcaaggttaaaactagggcgttgggagaaacaggtcagatttgatgtgggcaggctgcgactaggagtccatgaagctccacagaggaaattggacatcagggtcctaaacacaggcctgagaaagaatccactataccaaggatgtcccgtggggctcagagtgcaggagataagacctgcctgggaagcaataccatggcaaaaggctttcagttctaggagagatgcaggcatcttgagtttgaaagatgttcagaagttagaagttcagtttatacaaaggaaggccagatagaaagaagacaaaggcaggagacggtagcagaaccaggagaatgacctggcaggctgaccagtgacctgggcaggctgaccaatgcaaaggtcttgcctttgccatgcatgttttgtgcgtttactcaagctctatgggtagatagtctccaaagacagccattctaagttcctgctttcacctttatgtctgtcactctgccatagaaaggtggcatttatttatcctctcctagcatctgggctagcgatgtgactgttttgtccaaaggaatatgatagaaaatgatgatctggaacttctgagcccaagccttaaaaggcctggacacttctacttctgaaactgacccacttgtcccatggaattgaagtttatggtttctcttgaataaacagaaattagccctcccagtcttaaaatttgagaaagttacatttgtcttatctgagttccttttccagaaaaccaaccaccaggactcccagatagtatcaagaaactgaaactcaccagatcactgcctctggaccatgagatgtcagatccctcacctgtcacgattgcctaactgaccacctgcttcctgttgaccatctcctcttccctaccctccttagttcttgttttcccatacattgttacatttcttccttgctctataaacctctaattacagtcagttggggagatggatgtgggactgatctcccatctccttggctgcagcacccaattaaaccttctttcctggcaatactcattgtctcagtgattggctttctgtgtggtgagcagcaggacgtaggccaaacccctggtatttcagtaacatttccttcttggaacacagtcccatattgtaaggaacccaacccacatggagaggccaggtggaagagagtggaggcactcagtctatggtcccagcttagttcccaactaacagccagcatcaaccaccagccatgtaagctctccactgtggacattcagctcagccaaggccccacccagttgactagagtcccacctgacatcacatgcaaaagagctacccaggtgagccaagtcagcctatacagttagaaagaaaataaaatgattgttgtttctaagatgctaagttttgaggtggtttgtttttgtgcaacatatgattgaaacagaccttcaataaatgtcttggcttctagtgaagactttttttgtcatcatttatgacctaatatgttaggaatccagaaggcaggatatctgatgctctcgtggggcactcatccctcgaggatttgggttgatactgataattctcttttctgctaagtgcaacacagatgagctcacctatctacaggttttggttatattccatttagcactttattttaagttaccaaagttccctattttatgggcaaatctcataataagcccacatttgtatatttttctctcctatcacttaatgcaaagtagaagtgcaacacatattgctgaattcaacattcatttccaaatattcctgcatgcatgtgggactatcttaaatatagctcatgtgaccaaacaataacatccattgtcattcagccttatgtggaacatgttaactatttaaaacttccttggaaaataaaaaaaccacaaacacacactcaaagtgctaaaaatgtgtgaagataaatttgaaagaaaacaagatctttttaagaatttttttttttttttttacttaaaaaaatttaattttggccaggtttggtggctcacacctgtaatcccagcactttgggaggctgaggtgggcggatcacttgaggccagaagtttgagaccagtctggtcaacatggtggaaccctgtctctatcaagaatacaaaaaaagctgggcatggtggcaccctcctgtagtcccagctgctcgggaggctgaggcacgagaatcacttgaacctgggaggtggaggttgcggtgagccgagatcgcaccactgcactccagcccaggtgacagagtgagactctgtctcaaaaaaaaaaataataataataattaaatcttgtagagatgggcactatgttgctcaggctggtctcaaactcatggcctcaagtgatcctcttacctctgtctcccaaagcactgggattacaggcatgaggtacccgacctgtccaggctaggttattttaatttacagagattcagaggagtgaaaatgaataacagcaagtaactatgagtcaaaatctggtccaggaaggaaaggaaccttgatttatttctaatgccaacatacatattaataaaagcttcaaacattaaatgtgtttttcagtgttgtatgtgtttcctgtgctcatgtgcccgagagggggttcaactttgaaatgaagccccatgcaacacaaacgaggccattgagatgccacagatttgcctgagggcatttaaatgccttcaaatgttgtctttctggaatcaaaatatagttagaggttattatgttgccagcatgggagtgttagaatttttggcttatggagacttaatatggaagctgggcaggataaggattgagacataaggagcgatgatcaactgattctaaacgcactgcaaccattcatgaggtaagagaccagcagtttctgttacaataaaaatcagcatactcttgaacttacgaatcagaattagggatgactgaacctgtttggtcaaagaacacgccattctttaagccaaaacctaatgctttgctgaagagatctccctgccttgaggatcaaggtatggctcctgatggccgtaaactattggaaagtcaaaatcagtatctctggttcctcgtcatttaaggaaatctcagatgtaaggaaaatggggtttatatagtattaaagctgtttaaaataggctctgtggtgtagtctggaaaaagtgactagagtacaaagagactcatatttctgaggctctgcagccagggaatttcattgttagaattaggattacatacagcataagagggaacgaataagggtgagaggcggcttgtggaggtgacgagtgtgctttgggtcaagatggcttggtttccacaaaccagtgttgtgatcttgggtaggtaaactacctactgtactgagcctgtttttacatttataaagctagaaaatgatgacaatatctgacctgcttacctcacatgatgttataaggttccactgagataatccatgataaaacatgtcagaaacaaagtatgaagcactacaaaaatataagatttcagctacaatatcaacctggagaaacataaacaaaaagagagatgttggaccactgtgcaaatcaaataattgaatgaataaatgaatatatgattgatgtcatggtgcatatatattaaagtgagtcatggaaatttacaaacgatttcgaggtaaacttgatatgtaaattatgtcttcagaatacatggataagctttattgggcaattgggattttggagactggaaggaaagaaagaaaggaggatgaatggatgaaagggaaagagggaagtcatatcaaattagccagagtgcaggagacattgcaggcaatatatacgaagattaggaagagatgattggcagactcaagggacaggttgaggaacagaagacaacaggacactgggccaactgtaagcaaccaggtgctgttcctacttatttaagtcttacaaaccaccccatgaggtaggtattataatccccactttacagaatggggaggaggaaacaggctcagagagccttatctggcttaaggatatacattagtagatggaacttatataaaaactcagatctttctgaagtccaagcttctgttctttcttctacgtcagaagtcaggatttataaagtaatgagagatcccagaaagcccagcgagggtgaaatggtggggtggggtgggaataatacggaaatgagtagagaacaatgagtagagaaaatttctccttcttcacaaccttattttcgtttcatatgacccaatttcatcaaattattttaatatgctcatctcctaaataatcaagtttacatgtggtttttttttttttccttctctctttagcaagaagaaaaaagaaggtaattatattcaggctaacctgcctttttaaacacacaaataacaacctcttagctctcccctccttccccacccaaaccacctcctctggaaataaacacattaccaatgctggagttgttgcatgaccagaattacgggacaatcaacagtaggaaacgatattgcaaatacaattgagggcacaatacacaaacagccttataaaatttctcttacaaaacttcctgttacagacatcttcccataattggtgtgtgatgccattggccaaagtatcagggcagaaatagagagcctcccggttctcattataattaattggctgtaatagaaactttaaacaattgggttcatgatgtaattgtgacacgtacttcctttgatgaaatcttccatgggctgcaggaaatgggtcagtaaggaagtatacatgcaccaggtgcacaagatccatggaaactttagttttcgttttcctacccataggccaactcttttgctatgttccttttctagggagaactcaaagaattaaaaattggattataagaaaaataaccaagagtcttctaaaaagcgcatgcaataatgtcactcagaaggtaaaaccaagctctcacaacatgagggacctctcgcagagacctccaggtctggttttcagagctcttggtgactattaatatcaattgctcttttttctctttctttctgatcaaatgttgagctgtgaagagatgttcccactattacaggagctgggcagcctagctttgaatccctggtgactttacttgaaagctactttaccctctctgagctggagttcttcatcctcagaatggagctaattaaagtacacgagttcaagcaatccttcacctcctctgggagctacaatccatacatcccactgtatctttgctgtccctcaacccccgacatcttccctttcctcttagcccagcttaaattccacagccactcctttgcctaagctctcaactgccttacccctttctcttaccagttttctcttgacaattccctgaccctgatgaagtccaaagcactgcctactttgtgctcgcacctgggccactgaatgtggctggacaacagcattgtcacactaactgctctccctttaagttcatgattatggacttcaagtgggaccctaatgatggttggtaaagcccatgtattgccgcagaccacttactttcccactgaaataacagaagcaagcaagtaagaacttaaacttccttccaccacgatgtttaccactcacctgcttctgtgctcatagactctgcctttacttctgtaaccatgaataaacttgctgagctccagctaaggccattccctccacctgtgttataaagtcatggaccctgtatcctcttatctctcacagaattggctccagcaattcactcctctctcttttgcatcatccatttcccaccctttgctgcatcattcccatcaacatacgtactgtctgtcttcaacctcaaccaaagcctttctcctggccccactctcctctccagctactgcttcatttctcaaatctgtttttttagcaaaactcctagaaagagtagccattactggctgtttccaattcaattcccattcttttcttaaacccacgttatttcagctatgcctcaccatttccagtgccttctacatccttgattcagcagtcggttggttctccgtcatcatctccatttacctacaacggcctttgacagagttgagaacgtgcttctctgagaaacgacatctttatttggtgtaccagttactgggactgcataataaattaccccaaaacttaatggcttaaaataaccaactcattcattttgctcatgaatctgccatcgggacaggacttcatgggcactactcatttctgccccactccatgtcagctgggatggctcgaaggttgggatctagaatgatctgaagttctttcactcatatgcctggtgcctgggctaggaagactcaaacacctagaggctggaacacttaggatccttgtgcctctctgtctctgtctatctgttctctctccgtggtctccccagcatggcagcaaccatagcattgtggccagacttctcacctgtaggcttgggcctcccaaggcatgtgttccaagagaaagaggccagacaaaagctattttgtggtgtctttgtcatctagctttggaaatcatccagtttcacttttaccatagtcacaggcctgtcagattcccagggaggaaacattgtcccctacctcttgaaggagcagtgttaacctcacatggcaagggagatagtggtgaggctatctttagaaaatcgaaccatcacgcctgtaatcccagcactttgggaggccaaggggggtggatcatctgaggtcaggagtttgagaccagtctagcctagatagtgaaaccccatgtctactaaaactacacaaaaattagctgggtgtggtggcgggcacctgtaatcccatctactagggaggctgaggcacaagaatcactcgaacctgggaggtggaggttgcagtgagccaagattgcgccattgcactccagcctgggcaacaagagcgaaactctgtctcaaaaaaaaaaaaaaagaaaatcgacttataacctatggcttctggggtaggagttccttctcatctggctttaggaattcctctcaatcttttctatcccttaaatttggagtccccatggctctgtctttgtacttctctttttcacttccttctttttcttggtaatctcaaagagtctcatggctttcagcctatattctaatgattctcacattcacatgtttatatcagacctctcccatgaatatctcctcagtatctcttcttggatgtctaatggggatctcaaacataatttcgcagagatagaactccagatcttcccatccagtgtgccccagccataccttccccctgcagtgatggcaactctatcctgccagttggtcaggtgcaaaccccatctttgctttcctccttctgtcacaccctctactcatggatcagcaaactcttttggctttgtcttcaaaacacatccaatatctaaccactttttatatcttaacttctaccttcttgattcaagccacctacattatctccaacaattactcactttctttgactcaaagctagaactctctttttgttgctgctgtgcattctgtcatagtttcacagtcaagttgcgatcaacttggaaaacagagctgcaaagtgtacatatttaagaagtgtcccaaccaccttgatgggtgtcttctttccagccctaagctgcctctgatggcttgtagcagggtgaacaacagtatccctcacctggtgtttggaggctgatatggcattaggtcaaatcagggtaggtgcaaaggtcgtgttctgggtgagcagaatgggacattctattgcagggtttttgtttgttttgtttttgagacgaagtctcactctgtcgcccaagctggaatgtcatggtacgatcttggctcagtgcaacctccgcctctacagtgcaagcaattctcctgcctcagcttcccaagtagctggtactacaggtgcatgccactatgcctggctattttttttgcatttttagtagagatggggtttcatcatgttggccaggctggtctcgaactcccgacctcgtgatctgcctgcctcggcctcccaaagtgctgggattacaggcatgagccaccgtgcccggcctattgcagggatttttaaaaacaaaattctaagcgtgaacccatctgagaatttggtagaaaccacagacatctttcccaaaaaaggcaagtacgacataagaaaatagcttgaggaggtccatggtggaacattgccatccattcctgaattcttatgttccatgtccttgggtaaagagctggttccttaaagaccaaggaccaggagctattaatagctgattgtctccatgctttgacatcacttttatcctatcctcatggccacgggtgtggggtcgaggataagaactgcctcctgaattatcaagaatgctacctccaaaaaaacagtttgtcacagtgattaataacgcaactgcctagttctgttttaatccttgagttgtgagaaaaaagtactatgtttggaagaatggtcctgtttttgtgtcctacttttaggcaagcaacatctgctataatctcgggaacttagttacttgattggtcaattatttttaaatgtatttacaaaaatagaagctgaatgatttacactaacgtctaattattcctttttattattccagggagattttagaagtaactacaaaagtaagaattctctttgtctaagacatggcaaacaagattgtaaaacggggtctattgggcttcatcaaacttgaattggtaatggaacacctatattaaggaatattgtaaattcaggaacacgccttatgagagaatgtttgactgcggttttccaaaagggctgaaatagttttcactattacatttgcagtcgtgcacatggagtgaaaaatgggcagaaatctggtttatttcttcattgcatatattttaaatgtgtgagtagtaagaaattgccttatatttcaactagctatgctgctttgcagtaacaataactggaataattaatacactggatttgcaccaacttgattggaaggatttatgtttacgtcccccacccagcagagctgaattaggtaggcaactcgtggttccaacttttttgcactaaaggccattttgaaggtatgcacaacctaccatgcaattgttgacagcctgaaggtgctgaatgtgtaaaagggagtgtaaggagttagagcagtagtgaatttttgcaagtcagaaaagggtggagaaaagaggtaacagtgagcagaccagctcctgatccccctcaaatattgataatgacatagcatgcatgaaacccacgaaggagattacagattaggattcagcgtcatatcttaattcaggttccccagaagcaaattctaacattaatttttttttttttttttttgagacaaggtctctctctctaccgcctaggccaaagtgcagtgatgcaagcttggcttactgcagccccgacctcctgggctcaagtgatcctcctgccccagcccccgagtagctagaactacaggtgtgcaccaccatgcccagctaatttttgcatttttgtttgtattgttgttgttgttttgttttttttgtagagacagggtgtcactatgctgcccaagctggtctcaaactcttggcctcaagtgattctcccgacttggcctcacaaagtgctgggattacaggcatgagccaccatgcccagcccctaagattaatatttgtgtgaaagtgattgattaagggagtgccccccagggacacactaaagaaatgggaaagcagaaagggacagggaggaagctaagcaaggttgcagggtctagcaaagtcctgcaaagtatgacttcagcctgatcctgcaaaggactctgggatgtaagtcacacctcagaattgcaccctgagacagggagctgagctcccagcacccaataatcactggaggagtaacttcccagcactccaagttatttgcacatttgcacaaaatgtttacatttgcacaaaattgttccagtagtggaagaacatacctccaaagagcgtagatcaggctgttggaaggaaagcacacccaagtttgaagtgttggtggggagtaaggggagtggcacacaaacacagtgaaaaggcattcaagaaaatatagacacagtgggctgggtgtggtggctcacgcctgtaatcccagcactttgggaggccaaggcgggtagatcacgacgtcaggagtttgagaccagcctggccaacaaggtgaaaccctgtctctactaaaaatacaaaaattagccgggtgtggtggcacgtgactgtaatcccagctactcgggaggctgagacaggagaattgcttgaacccgggaggcagaggttgcagtgagttgagatcacactattgctctccagcctgggctacagagcatgactgtctcagaaaaaaagaaaaaaaaattctagacagagtgctgacagtgcctgctatagatcacccaacctctgggagcctaacctgtgatttaggaagatggggatttgtccagtccaggtggtggaatcccaccaaacatgaccacaaacaagagtttttatgatttttgtttgttcatttgttttgttttgtgttttgtttgcttatttgtttgttttttgagacagagtctcactctgttgctcaggctggactgcagtggcccaatctcagcttattggaacctcttcctcccgggttcaagcaattctcgtgcctcagccacctgagtagctgggattacaggcatgcaccaccacgcctggctagtttttgtatttttcgtggagatgggacttctccatgctgcctgggctgctcttgaactcctggcctcaagtgatccgcctgcctcagcctttcaaagtgctggaattacaggcataagccactgcaccaggccaagtttttatagtctttacggacagaataaactacctagctctggactttgtgacatgattttatcagtcacttccttgttttcttgtgtatctgagctttattcagtgccaggactctagggcagaagttaaaaaaaataaactggaaacagtcattgtgcatgcaattgaaaataaacaaaacgttccagtgctctttgtgcagaagatttattaacaagtgttttttgttcgctggtaaatcaggggctgtgacacttctttcctttcaaatggattgctgcaaaagaaattataataattatagctttgagaataatttaataatttgtcaacacttttttccatccaacaaccagaacacaacaacaaatagatgtatttttagaaacacacctgatgttttgcagaaaaccatgaagaaaactacgaaaacatattgaaagaaaaatgttaatcaacctgttcctcacaagataatatctgagcaaatatgtacaagaagatattacaggatgattatttctaattagatatgggcatatgaacaataaaggtaattaaacatatagtgccatggaacattctctatggcccaaatcattgatatcaaataactttaacagtgagattactatccacataactgagaaataaatcaggttaagcaaagatcatgccgcttcattattgttcattttgagagattcatttaaaacaaattgatttggtcgagcatggtgattcatgtctgtaatcccagcacttttggaggccaaggtgggcaaatctcttgaggccaggagtttgagaccagcccaggtaacacggcaaaaactcatctctactaaaaatacaaaaattagccaggtgtggtggtgcatgcctgtaatcccagctactcaggtagctgaggcacgagaatcgcttgaacctgggaagtggaggttgcagtgagccgagattgcaccagtacactccagccttggcaacagagtgagactctgcctcaaaaataataaataaataaataataaagcaaattgattcattagtcacccaaatcatttattctctaagtatagatcaaactattcatggattatcttttttgtgttttcagagacccctaaaatattaaagaataattccaaattatagataaattatttacaaaatagtagtcttaagctaccagtgtgtacctggtgattttttgctgaattcttttttttttttttttaagttataacctgtatacagcaaagggcaaaaattgcaaatacacagcttgataaattttagacatgtctacagccatgaaaccaacaagacatagaatgtttcaagctcctgaaaggctgtcttgtccctctccaggacccccccagaggcagccacatcagcatagatgttttgtttgcttttgaatttcatgcatgtggaatcctacagtatatatagccttttgtgtttcacttattttgcccaacattatgtctgaaattcatccttgttggtgtgtttcttacttctttaactacataattttccctaaagaacttaacaaactttgatagttaaggcttatcttttgtattggacagatttggaggattgaaactaagctaaaattctttgccttgattgacttgctctaatcccacagtctcaaattgtcaaaggaaacgtaatgttttgtaataccataataattttgaacaattctacttgcaatttcggtagcgttctatatttattgattattaaatcaggttgcatttccacttccaaactagaagacagatgaaaagctatctggctaaataaaattttcatcacataaattcattgacttgcctgaggctgtaagtgcaatttaacttcagcctcatctaaaaacctccatgggctgatgtctgaacagctatttctcctacactaacaactaaaatgcagttggtaaagggatgagacattcaccttagatggttgcaaaggtattcatccattgtgaggtacagaaagacttaaggtcctcctgaggttctttgtaaatgaaagtgacctcaagatctgaggcaaagagctacatgcacagataagagaaacaggctgtgagcaaggttacccccgggcagtcagcaatctgcagaggggttggctggtgtggctggccctctgggtttcctttgggccctctatctattaggcaacacttcctggcattgaatttttctggatggcatgatgcttaacaaaaacactccaataagctgcaaaaatcaagcctgtcactgaagctcagagaacaacttctgctaatacagtgtcaaaataaatcatcaatcaatgaatactctctgatcagacagaatgggtaataagtggtagaatcccagttcaagttttcttaagtaaaacatacatacccacatgagggcttccttagggaagcatctggaagtgaaattgctggattatagggtgtgtgcattaggctttaacagctacagtcacgttttgctgtggtgtttttgatactccggctcccctgcctccatatttggttagcacatagagccgctgctttgccctgtcctctgtgtcttcagtgccacttggtttatgcaagttgatcttgcccaaggagcctgccctgtattcgatctgccttctgctgcaaaagaatgaaacttctgaaatccagggtagctgcatcatctatttcagatggagatgcatcttcaatgaagcaggaaatatttacaggtagcaatctaatatttacccaggaagttttacattgatcttatcctacctagaaaccttgtgccatggtttgtaaacccaaatgcctatgggggggctgtatagcacaataggaagtggtggggacctctggggacctgcctagcccatcctcatgaagatggcaacagctactcaataagtcactgtataattctcacaaaacaacgtgtgaccaaaacactacctaaggactaacagaaacctaccagactgttcaggcaaagcctcccctttatagataaggatagtgagcctcaaaaaggttatttttcatgttctatgacagagctagtgactgacagagccccggacctctggagctgcatccttcccaccacactgcagtacctgcttgtgatggtgaatctctattccctccctccatccccccgtgggtcaattcggctctcccttctcttgctctgtgccctcagttgccttattgggactgccttatttcctggactctggatggatttggccaatggcaggcactagcagaagagtgaggaccagggaagaaagacgctggggtacttcttccttatttcccctgttccctgggcaatgttctccagcagtggctgcatccatccatcacttcaacttataggaggtctctctatcaggagctattctcactgggctcctgggacactactcctaccctctgcctctttaggtctggggtgacaacggcccacttccattggcccctgggtgcttctccatctcctgttaaccctacctgccccactgtcaaagtccctccattaaactctctggaaacatctaagttcaattgtttcccaccgggaaactgatgtatgcttgtttgtatgctggatgaaaaatgaactgagagtgaaaagttagttttgtacttttattttttaatgaaaaatgtttcttctacttcattttctatcacacaaaaaactccttgaaagtattaaaactctatatcccaaggtacatccaatggccaatgaacatatgaaatgtgctcaatttaattagtcatcagcaacatgcaaattatagctattatcagaatggctaaaatgaaaaagacaaataataccgagtcctggagaggaggtagaacaactgaaactctcaagcactgcaggcaaaagtgtaaattgacacaacatcctttggaaaacagcttgacagtatcaaacatgactctatagtccagaaattccattccaggtatacctattagaagtgcccacatatgtatactgaaagacatgtgccagaatgctcacagtagaactacttgcaactgccaaaacagaaaacagccaaatccccagcaatagtagaatgaatcgtggtctgttcacatcatagaaatacaagtctctgcagcaatataaatgaatgattacaactatgtgcaatcatgtaaataaatatcacaaatataatgttgagtgaaggaagccatactcgaaaagtataaatatagaaaaaattactctatactgttagaagtcagatatcgctctcttggctgaagggaagtgtccaggtgggagtttcaggggttttgtgggtctgagtgctggttacaagggtgtgttcagttttttgagaaattcattaaagtgtgtagtttttgttttgttttgtttttgaggcagggcctcactctgtcacccgggctggaatgcagtggtgcaatcacagctcgctgcagcctcaaattcctgggctccttgggagaactgggctctgcctcagccacccgtgtagctgggactacagacatacaccatcatacctggccaattttgtacttttattatttgtggagatggggtctcgccatgttgaccaggctgcttttgaactcctagcctcaagtgatcctctgcctcagtctcccaaaactacatagtcttgatatgtgtactcttctgtatgtttattatacactaataaaaccttgtttccatgttcaaatttatactcccgcaaccacctgaatcaatataacacattagttctaattggcaaattactcaaaaacagagacaccaaattgtttccctcaccaacatctagatattttcaaatcttgtagcaagtgttgcaagcaaattgctagactaggaccagtgcattattgggaaccaatctatttatagcatgtttgccccacttataaattctagatgtctattccagaataaatgaaatcattttcacattggatatgcctgtataatttccactgcatttatcatacacaaagtgataaagatgtggtcctagatgtctatttttagaagaagtgttaagagatttttgtcttatgtctaaaatatctactgtcttatatttagaaacatctaaaataattctgccacacagttgggtcattgcttgggcagaagaaagtctgacagaggttgtgttgggtctcagagtgaggggtgggcagtcagacagaaggtacaacagtgcaatggttagggcctcccaatggctgggaagtcaaggggcgggggtaaccactgagacagctaaccttgtcaaagaaaactcttagaaacatttaatctggatcatagtcatctatatgccagccatgtccaacctcagaatgaagaaaagaagaaaagaaaagccagcttggcacagtacagggcagaaactacacagcctctgtagtaaggccaggaggctattgtgaccacacacatatgccaacttatcttggggtctactttttgtaagtaaggttgggagcagagtcatacaacagcgacatcaaagagtgtggtggaagctgggggactgggatgcaacagcgcgttaggagaacacttccaacaactactttaattagagcattaattagtgatggagcctcattatagttccccaaaatcttagtatagctttcccacatttccaattgcaagagaacaaaggcaaagtaagaaagacaaggcaggagagggaggacaagaagaaatgcattggtgagcgtaaccagctgcatttttacctactgaaaattaagaaagaagttttcctgtaaaacactctcaataagtgttatgggaaatatagtagtatgagcacaggtgactaatgaccattttaatttgtagtcaggaaaaaaggaagaaagaggaaagagaaataaccacaaagatctacaattgttatacaagatgtgtatctagaaaatcaaaatttcatatatgcaatctttcttttgagacacggtggcaacttgtctaatagataaaaaataaattggatttataaaatgctcaccagctatcattgcagtcttttggacagcaagttttaaaaaattatattagaaggaaaaattaagatcctgagtgattatataaattgcttcaccaaagaatatatattgaattgtttagaagtaaacagcagctttttcataggcataaacatgtggacttaagtatcttaaatcttttactctgaatattaactcagacctctttacaaatcatattttttaccgccttttctagctgaaacacaaaactttaattttctcccctgacatttgtctaacagggattgttcatctatcagatttgcaggaaagtgtcagggtgttagaaggtattaaaatcacatggcaagaaagcgacctttgaaattcctgtttgactaaatttctggagaaaggaaatggaaggaggaaagacaatatcgtatatctttgttagtttaatttgctgatgactagtgattactgccaggaaattgttatgctgtttgcaggaaagttgaaagggatagaatgtctcaaacattggcctcccatatggggcaggggagctttgaaataggactgaagtcccagcttccagaaactagaggagaaggcgggacccactcagaaccttcaagtctctgctagtcaagttagctgactgtcaattctcggaaactagccttctctttgtagcaaagtagacatcagaaagctagaagttcaaaacaatttagaaaaaaatatgtatactcagtgatgacagctgaatatgatcactgtgacactttggccattttcatgctcttcctgctgttctttttcttggctatttttttttaaagtgtatatttgtaaccatgggattttgtaaccattcaatttttctaaattttgtttcattttttacaaaagcatttcttgtgttgctatctcatcatcacggccatattttaactggctgcagaaaattccatcaagtggattaccagaatttattgaacaagtgctccatttaggggcatttaggacattttttctatccgcccaggcctccatcagagaacatcactgcagttgttggccaggaagagccaagctcagggaaagaaagtccaaaaaatgttcccattgggaccaaccagatctgccccctttcctgccagccaaggactggtgagcactgggtaggtgggtggaaaaggagtcacagagtgtccttaacttaatccctaaccctgaagggctttgatgacaatgaaacaacatagacagcccagcccagagcagttaatcaaatgccaatttccccctcaggctaatgagaacattttatatgcaaatcagcctaccttttaaagttagcatctcactttcttgggaaatgcccctagattagaatcactaaatgcaaaaaggcattcccatgtaaaggcatccttgactctttgcaaattgctcctctgaccagctgtcagaagttccttccattattactactcctaaaatgaacacactcagatactcatactaaggatggagattaagtaattcttgcctttcccctgccctcccctttccccagacccccacagcctatcctcatctcagctgcccaattgattatgtgaacccaaaagtatctgagacagttcttaaccaacttagaaagtttattttgccaaggtgaagaatgcacctgtgacatagcctcaggaggtcctgaggacatgtgcccaaggtggtcagggtacaacttgctttcatatattttagggagacattagacatcagtcagtacatgtaagatttacattggttctatctgtaaccaatgtaagggtgggacaacttgaagtgagtggagtaggcttccaggtcacaggcagatttaaaaattttctgattggcaattggttgaaagaattactatcaatagaaaggaatgtctgggttataatgaggggttgtggagaccaaggttttatcacacagatgaagcctccaggtagcaggcttcagagagaatagattataaatgtttcttatcagatttaaggtctgtgttgatgttaatgctggttgagatggggtctcgctctgtcgcccaggctggagtgcaatggcgtgatctcggctcactgcaacctccacctcctgggttcaagcaattctcctgcctcagcctcccgagtagctgggattacaggcatctgccaccatgcctggctaatttttgtatttttagtagagacagggtcttgccatgttgaccaggctggtcttaaaactcctggcctcaagtgatccgcccgtctcgaccttccaaagtgctgcgattacaggcatgagacactgtgcccgacatggttggcttttgctgaatttaaaaagggagaaaaatataatgaggcatgcccaactcccacttccatcatggcctcaactactttttcaggttaactttggagttcccttggccaagaggaggggtccattcagatgatggtgcagtgggggtgggggggcggcttagaattttatttttggtttccattcacattgaaactgccctgaattcagattgtgccctacctttttcaaagccccacccagcctcttgctctaacaagtaggcagattcccacctcaggcttactacacactggctgttccctctgcctggaaggctcttccacaggtgttaatggtgtcctccccaacctccttccacattccgctcaagggttccctgtcctgtccacactgttgaaagtgcagcccccaaacttattctgccttgttcttggccctgctttgtccttctccatggtacctcctgagaggtgacaatgtgctggcggccctcgctcgctctcagtgcctcctcggcctcagcgtctgctctggccatgcttgaggagcccttcggcctgctgctgcactgtgggagcccccctctggactggccaaggctggaggtggctccctctgcttgcggggaggtgtggagggagaagcgcaggcgggaaccggggctgtgcacggtgctcactggctagcccaagttctgggtgggcatgggctcagctgccggcactcggagcagccggtcggcgccaccggccaggcagtgaggggcttagtacctgggccagcagccacagagggggcacagggtcccatagcactgccggcccgcccgcgccaggctggaattctcactgggcctcagccgcctccccacggggcagggctggggacctgcagcctgccatgcctgagaccccttggggacctgcagcccaccatgcacgagcccccaccttggtgggctcccgcgcggccggagcctcccccacgggtgctgccccctgctccacggcacctggtcccattgacgcccaagggctgaggagtgcaggagggcagctccacccacggccctggcccgggatccactaggggaagccagctgggctcctgagtctggtggggacttggagaacttttatgtctagctaaaggtttgtaactacaccaatcagcactctgtgtctagctcaaggtttgtaaacacaccaatcagcaccctgtgtctagctcaaggtttgtaaatgcaccagtcagtgctctctgtctagctaatctggtgaggacttggagaacttttatgtctagctaaaggtttgtaaatacaccaatcagcactatgggtctagctcaaggtttgtaaacacaccaatcagcaccttgtgtctagctcaaggtttgtaaatgcaccaatcagtgctctgtgtctagctcatccagtggggacttggagaacctttatgttttgctaaaggattgtaaatacaccaatcagcactctgtgtctagctcaatgtttgtaaatgcaccaatcagcactctgtatctagctaatctggtgaggacttggagaacttttatgtctagctagaggattgtaaatgcaccaatcagcactctgtgtctagctcaggtgttgtaaacgcaccaatcagcaccctgtcaaaatggaccaatcagttctctgtgaaacggaccaatcagctctctgtaaaatggatcaatcagctctctgtaaaacggaccaatcaacaggatgtgggtggggccagataagggaataaaagcaggctgcctgaaccagcagtgacaacccctttgggtctccttccaccttttggaagccttgttcttttgctctttgcaataaatcttgctgttgctgactttgggtctgtgctgcctttatgagagctttaacgttcaccgcgaaggtttgcagcttcactcctgaggccagcaagaccacaaacccaccgggaggaatgaacaactctggacccgaggaactaacaactccagatgcgctgccttaagagctgtaacactcaccacgaaggtctgcagcttcactcctgaagccagcaagaccacaaacccaccagatggaagaaacttcaaacacgtctgaacatcagaaggaacaaactccagacccaccatctttaagaactgtaatactcaccacgagggtccgcagcttcattcttgaagtcactgagaccaagaacccaccaattctggacacagttaccatcatctgacatcctctgtattttgcttatttgtttctggcttgtaatacacacccagataaccagcttgcttaggcaggggtccttgtggatgtggcttgctgctgtattgccagcattgagaatacagtccacctattacaggatactcaacaaagattcatcaaatgaatgttttaaaccagtgatttagtaattgctttgagactgccattaggtcatatcccttttagagacatgttaaacttgccggtgaaatccacggcattgaatggcccttttcttttcttccctcctctcccctcccctcccttcccctcccccctcttttttgtcttgctctgtcacccaggctggagtgcggtggcgagatcttggctcactgcatcctccacctcctgggctcgagtaatcctcccatctcaacctcccaagtagctaagactacaggcacacaccaccatgcccagctaatttttgcagagacagggttttgacatgttgcctgggctggcctttaacttcttggctcaagcaatttgcccacctcagcctcccaaaatgctgggattacaggtatgagccaccatgcctggcctgaaccacctgttaagtaagaccaacatataagatgctttttatttcagtaatggaactttgttgacaatgtgacccaaaatacaatcactgtaacccacagcctgttctatgagtcagaatttttaaaactcccattctttactcttttttgcttaggaccactgtatctgcctgcaaaagccatctcaaacaatgagaacctttttctgaaaagccctcggatgaatacatatagaaactttttctttctctagaagaaatgactcaggccagtttaccagaggatagaaagcaactccctggctctgtcctcaggtaagtctgtctgggttctgctctcccaaaaaaagtataactccccagtgagaaaatttaccaggtcaccttgctctgagatgttgtaacaaagctttggaatcaaattcaagtcagagatggtatcatggttttcctttgaaatgacatgaatagagatttacaagaggagaaggttgaaaatgaaattgtgcagatacccatggcctgccctgggtgccctgcctgcctgccacttcacctccctacttcatgcccactgtcctcattgcagatggccactcactgcattcccaattagcacttccccgctacaggccagaggcacaggggagttcagatctctctgaagcggccctgaaacaatggtcactctaagttgatgagtgaatatgcaattcccttgccctcgggtgggataactctggctggtggctcacactggagctgagcccatccaggcattgagtggaccacacccatggactcctgtcctccatacattgtgtccttagcttcactcctcacatcaactctgcacgccaatccgtttcctaggatcgctttctgagagactccagactgagacaatgtgcatttcaaaagggcacctacatgtgccaaggccctgatcaaatgacactttcatgtaaaacttctttttttttttttttttgagagagagtctcaatctgtctcccaggctggagtgcagtggcgcgatctcggctcactgcaagctctgcctcctgggttcacaccattcacctaccacagcctcctgagtagctggggctacaggcgcccaccaccatgcccagctaatttttttgtatttttagtagagacggggtttcaccatgttagccaggatggtctcgatctcctgacctcgtgatccacccaccttggcctcccgaagtgctgggattacaggtgtgagccactgagcccgtcccatgtaaaatctctttcttattgcttgtatctttctttctgatattctctcctatttcctccttttctcctgcttttcaaccccccacattcttatcctttgtcccttctctgtctctttttgttacctaaataccaggggtctctgtctaggtcccattgctagaggcacagaaagccaatcactgagacaacaagtattaccagggaagaaggttttttggatgctgcagtcaaggagaacaagagataagtctcaaatctgtctcgcctatggactaaaattgaggtttaagtagctggggaagagatgtagttacctgcaggaagaagttaggaagcagtagggaagcaatgctgctgagtgaggggtctgggatctcatcctctggatgcggtgatctggtgagtttcagttccgtgcctgagggtgggtttcctggggaaggaactcagatgagacaaatgtaaatttcaaattttaagaccaggagggttgatttcttcttttattaaaaaacttataaatattgtctctatggggagattgagctggtttcattttctttcatgctctgaaatgccagctcacccatgtgattgcaaacccttcatagccactaaaaccaagtggttattctcacagaactgcacctcaggccactgggagggctaagtgggactgggacattattaatggattcagacaaggtaagatgagatctctttgcctgcagaagcctgagcttgctgacatctataccaggacagcctccggaaacttggcacagccagggagaaagtcaataaaccaagggcaagactgctgggatgtagcaccttaatatcctatcaggtgaacttgacaatgagcccaggcgatccttgccccaggggcttcaatttgcattgtcactgaggcctccaagaagttaggattgccaaactagaatgttctgtggaagtttgacagtacaaggaggggttatgagccaactgctacattaaactctgcattgaacaagaattaggtaattttagcctagggcaaaacattaccgatccccatcatgtgcactgcactatactggctatgccttcaaagctgctcatcagtgatttgtattttctgagactcaaagttgggaaagatggaaacatatggaaagaaattattggaagtcaccatcacaagtcaaaagtgagaatgtgatctttcatatgctgatttcataaaatgtatgtttctgataagaatagatactagatcttagccaaaagaaacaataggtgtgtgtttctggtcactagagcacacatttctggtatttcccctccccgacaccccacatccgctcagcacccagcatctttcagcatcccaatccaaaatcttcctggggtctctggggcccctctgtccttgggagcagccctccacccatggctggtgggaatggattaataattagtctggaaaccttccccactctctccaccctgagatgtgctgtacgcggtctcccagcattccgtgccccagttgattttggcaattacctgcttggtcacagggcctttagtggctgttttcctcccatctctcatccccatcccctgctagtgtttcctaatgtcacctcaaacataaacctttggactcttatccttgactaaggggcttttctggcagaacacagagtaaaactcacaaaacccagaagtctgcttaacattaaaattatctaaaaactaaaaggctaatgatggtatgaatttcttataaagaatgttttttgtttgtttgtttgtttgtttttgagatggagtcttgctctgtcacccaggctgtagtgcagtggcgccatctcggctcactgcaacctccacttcctgaattcaagggattctcctgcctcagcctcccgaatagctgcaactacaggcacgtgccaccatgcccggctaattttttgtatttttagtagaaatggggtttcaccatgctaaccaggatggtctcgatccacccgtctgggcctcccaaagtgctgagattacaggcgtgagccactgtgcctggccataatgttttaactgatactttggtttgagctcagatatgtgtatctgttgggggtagtaccaggcaaaaatgtgagacagctggaaaactttgttgtacagggtcctgggcctcccttactaggctacacatccagtgtcctcatcatactatctggcaactgtcaggttgtcctgaatgccccactaggaatcctcctctcttcccagatccctgtctccatttcataatcatactctcggtcttcctcaacacaccctctgactctgtgaacatctacatactgcacctgtgaatcctgtgggcaaaacccaacatgtgaatctccccagacattcatccccacctgccaccttggagacatggtgagtctggccacagctgcctttccctcatctcctgacagtgccgggtgtttatgtcctccctgggtgtgtcagtcctcaccagagcctccattgcaccctccgggacaggaactacagcagacctagcaccccagtgcaggctgcccaagctctgcctgccagtactggacagaagtcccacaccatatgcagcagattaaatagagacacagatccatcaaagttcctcccatcaagagctacagtcaacttcctctctccttgattctgagcaggccctctgatttgctttgatcatagaatgtggcagaagtggcactgagatacatgatttactaaaacctgcaggggagaatcctcccttgcctctttctagtttcttgtgtgtttctggcaatctggttttccgtggcgtatgcatgcatcccttcgatctgtcttcacatagtgctctccctgtgtctcctcatgtcatcttccctccgtgcccatctacgtgtccaaatgtctcctttttataaagacatcagttatattggattacagcccaccctcatcttaatgatctcatcttaacctctgtgaggaccctatttcaagtaagtgcacattctgaggtaccggggattaggattttaacacatcctagcttaaaaagcatctggaaaaggaacctatcttatatatctttaatacaaactgtattagcataattgcttttaattttcttttttaaataactcccagcctgggcagcatggtgaaactctgtctctacaaaaaatacaaaaaattagctgggcatggttgtgtgtgcctgtggtcccagctacttgagaggatgaggtggaggatcacctgagcctggggaggtcgaggctgcagtgaaccgtgatcgcaccactgcactccagcctgagcgacagagtgagaccccatctcaaaaaaacaaaacaaaacaaaaacaaaaataaactccaattgagctaaaaaacacaattgaattatctttcaacaaatttcacttcaattggaatggtcaataaacacacatgccagaaccacacaatcttgattactgtttttttcctttttttgggacagagtttcactcttgttgcccaggctggagcgcaatggcacaacctcggctcactgcaaactctgcctcccaggttcaagccattctcctgcctcagcctcctgagtggctgggattacaggtgcctgacaccacacctggctttttttttctttttttttttttttttgtatttttggtagagatagggtttcaccatgttggccaggctgatctgaacctcttgatctcaggtgatccacctgcctcggcttcccaaagtgctgggattacaggtgtgagccaccacgtctggcctgattactgtcattttgtagtaaattttgaaaccgggaagtgtgtgtcctccagctttcttttttattttttcattgttttggctattttgggacctttgcattttcatatgaaatttaggatcagcttactcatttctataaaaaagccagctggaattttgatagggaaagcataaaatttgtaaaccagtttgaagagtattaccatcttaacaatatgaaggttttcaatccaaacattttttaaacaatgttttatagtttttagtgtataagttctacacttttttgttaaatttattatgaaatattttatccttattggtattattgtaaatggaactgttttcttaattacacttttggactgttcattattagcatatagaaatatgctaattctataatgagcttggtttttctataatgagcttctatcctacaattttgctgaacttgtttattagttctagtagtttttgggtttatttgtggattccttaggtgtctcaattgtcaaaatcatgtcatctacacatagaaatagttttattcttcctttccaatatgaatggcttttatttctttttcttgactaattactatggctaaaatctccactatactgttgaatagaggtgacaagtgcaggtatccttgattttttctgaagttaggaggaaagcttttagtgttttacctttaagcatgatgttagctgttgattttttatagacaccttttgtccagttgaggaaattcccaggatgtattttttttttttttcgagatggagtttcactcttgtctcccaggctggagtgcaatggtgcaatctcagctcattgcaacctctacctcccaggttcaagcaattctcctgcttcagcctcctgagtagctgggattacaggtgcccaccgacacgccctgctaatgtttgtatttttagcagagacggggtttcgcggtgttggccacactggtctcgaagttctgacctcaggtgatccacccacttcggcctcccaaagtgctgggattacaggccagtgccgctgcgcccagcccccaggatgtatttttaatttgtttgcaaaatacactttataggtaactgacatatcatttggtgtctggaagctagcttcctatatatggaaagtcagacatgcactgcagagcccaaggactgtaatccttgaattctttcaggaactcctgaactacaataaaccactcttaacttagaggaaacgaagtattctttagggttgtctggcagatcctggggaaaaggggctggaggctatgacccctgagggttcttaccacatcaggatagatagacaagtccatattcctgcagtaagctctgaagagaatgtcaacggttatttttgtccagtggaactcacagttatagatgggcttcatttatgagtttatcatgaaagcatttggttctaagtgtggaaaaatctctttagcagccaaaaaagaacaggaattttgtctaacatttagatgcattcaaataaagactttggaattaaataagaagcatgatcttcatatcttaaatgaaatcccaactaagcataagcatgtgctgagagtttgttcactcattttgccatcacagagaagaccagctgtaacatgccacccttgagtaaccacataaaagaattcaagatgtcaagaggacactattcatggacagtatttatgaaatctgtgttaattggtactggtagtgggcaagataattctaggtgtcaaacttcaagagtaaactgaacaaaaccaggggctcaatgctgggttgttcagctgagcaactgttcaaaaacttccttgggatggtgggcctcttcccactcaccgcttactgacacttggccattggtaggtcgcaagtagtcttgcttttcaattagctgagtttttgttactatttcagttcttttcagggtgcctcaatatagcttccaggaacagaacaaaaccttgagtttaaatacagtgtatacgacttaacttatttgtgtaaggaaacatggagcaaacagtgcacactgacaattaattagtaggttccattgcaatgcattgctctgcccatggtctgagatggtaaactcagtaatttactgtacattgctaaaaacaccaaagacattgatttgtctccacatctgagagtcaaatatggttagttccagagacatagactctacctgcccaaatggctgcaccagtttccattcctactaccacattacaatatttatcatgttgagtcttgttcagtattgttcagtggagtcttaggcttaattacatttggaggtcttctgatatgaagtatacaattgattgtctgaggctggaaaactttttatgtatttaattctgtaagaaataaaatttgccaggtgtggtggctcatgcctgcaatcccagtgctttgggaggccaaggtgggaggatcacttgaggcccagagttcaagaccagcctgggcaacacagcaagacctcctgagtggctgggactacaggcacataccaccatgcctggccaaaaaaaaaaaaaattagccaggcatggtggtgtgtgcctgtagtcccagctactcaggagattaaggtgggattgctggaacccagagggttgaggctgcagtaagctatgatgatgccactacattccagtctgggcaacagagcaagacactatctcttaaaaaaaataataaaagtaaaaagtaaataaaaagaaacaaaatttgcccaatagaaaatatttatgatgacgattccttcccagcttatcaatttttttctcaaataaatttttgacccagaatggctataataaaaaaagatataaaaaccagtgttagcaaggaggagaaacagtagaaatgcttatatacaaatggtggaagtaaatgttactacagtcattttagaaaattatttgttagaaaactaaacatctgagccaagcatttttggcagaattctgaacatgtactcatctatggaaatgtactaaaatgttcacagcagcacagttcatattaacctctgcctggggctcagcacacaataccctgaagtatggccccttggcgtgctgagtactctgaactgaaggagactggaggggcctcagaagcaaagcctctgacctcctcctgcccttgttctcctctccctttcctcccgcaagccatgtcatagaaaccaggattcctcttttcctgaagtgggtcatagaaactagaactcctttcccccaaggcaagccacaaaagctagaaaggacactctctgatacgcctcctctgaaggtaggccataagaccctcttccaagagggatcctgcttggatctaggaggaagaaatgctgtatacacagaggccaataatatgaacaaacattttaaaaatcttaaataactgtaaaaaattaaaagataaaaaataaatgataaatctaagaaaaaaattaaaggccagttgcattgtaatcccagcacttcgggaggccaaggtgagaagattgcttgaggccaagagttggagacaagcctggccaacatggtaaaacccccgtctctactaaaaatacaaaaattagccgggtgtggtggtgcactcctgtaattccagcttcttgggaggctgaggcacaagaatcacttgaaccctggaggtagaggttgcagtgagcctagatcgcgccactgtactccagcctgggtgacagagcaagactgtctcaaaaaaaaaaaaaaaaaaaagaaagaaagaaagaaagaaaaggaaaggaaaaaaacggaaagaacctgaacaagtaaagggtctttgctgggttctcccactccatcccttttattatcattggactttttgtccaatcacgcttctccacaactatccacttctttattcggacttagcatacaaaacagggcaaaatgaaacagttttccctggggtttgggtcttcacttctgaagtctcccatatcatgtaaaacttggataaacatatgtgttatactttttctcttgctggcctgtcttttggtagaagagtgtcagccacaacccttgtgatgagtgaggaaaaggcattaccttgtcatcccctgcaccccaaactgggaaggatccaaatactcagcaagagtagaatgcataaataaattatggtgctgtcatagagtagaatactgtgttatacagcaataaagctgttcctctataattggtgcacatttctgtattatgctgtagctcaataagaggtttattaaaaaggaatatctgatcaatatttgtttctgttttcaaaacattaaaaaaattctctgtgtctttaaactctatttttttttaattaatagcaatgtaattggtccatctatccttgctcaactcagcatgtaccaaacccagcaagagtgaagccagggcttggcatggtctgggcgtgtcccttctagatgctagcaggattccttccaggttatgttgcaagcaacattgcctcattaaatacttgtactgatggggatatcaaagcttgcactccaaaatggaaaccgagctacaattgcaatcgaattttgagaaaatgtagtttttgaacacagtggggatgaacaagaggggctcagaccagagggtattttcttatactccctgaaaaggaggtgtcagatcaccactatagcaatcatcaccataattagctgagacttcctctttagtggttgctcaacaccttcatttgactctgctgctcactctagctgcctgggagttggtgccggcatttcgcaacacagccggtccttgcctaccaaccgcactgtctgccaagccaagaaggtggagaaactgcaggttcatgttacaggctgagccaggggaggtttctgagccctctctagcacttggcctaagcctccagacttctctgtcataccccaatggtgccaaatatccagaaactagcttcctaaagtggctttaacaaaaatcaactttattgaggtttcatttaatgcaataaacagcatccatgttgtaatgggtatgatttcgtgagttttgggaagataaacataaatccatggccataatcaaaatcatggacgcaatcgaatcacaaagcatgtctttcctccctaaaattttctcaaaccccactgcaaacccccacctcatcatcactgtagactagttcacattttctagaataaactggcttttggataaatgagggtggggatgtgccaacctaagcatgtttcacatatgcacacacatgtgtatagacgtacttctttcttggaagggagtcccttcctgcagctcatgccaaggcagacagccctaggtggcttcagagcatatcctgtgacctcctggacatagggttgcaacaggatggggcacctgacccagcaccttgcaaggagggttgaccggagtgctctgcaggggcagaagttctgagtcagctcaagtggggacacagagatattcaggggctaggatggtgggtggtggcggtaactgcggagcaacaggggcaaaagtggctgagccctgaaacggagttctcgctgtgctggaggctggagctggagatcaaggtgttgtcggcggggttggcttctcgttgggcagggtggcttcctctcaggcctctctcattggcttgcaggtggccatctgctccatgtgtctgcacacgcttttcctcctgcaagtgcctgtgtcctcatctcctcttctcctaaggacaccagtcacattggagtaggaactgcccgtgtgacctcgttttacctttattacctgtttaaaggccttaactcctaagaaggtcacattctgagtttctgggggctagcatatcaaaatatgaatttgtggggcacacgattcagtccagcatccataaaggtggcggatgggtgaactcctcctgttgtgggctgggggttcaatgtctcctcaatggaactgagcccctgggatcaggaactgctcttggtcccagacaggagtcctgaatttcagtccctgtgaggcctccctcagcacaactgtctgtgagttcctaattttcctgttgcttttgttcctcatcttttcttggcataaacccctgttacctgaggatgacccaactgagtagctgttcccaggaggtaaaattataaagcccgttggattatagcatctatggcctaattacaaatagaaagcagggagaaggggtgagaagtgaattcttggcctagtgggagaggaaagaagtggctaacccctttccttttactagtcataaaaaccttttttgttgttgttctggcaatcaaggtaacaataaaataagacaattattaccaagaggtattccctatgcccatttaaatcggtgctcataaacttgtcttgggcatacaggccagaagtgcctcatgtgttttttgataaaacgtcctcccgagggcaggcagaaatagcagagcacaggctccgctctgtggggtcatgggtttcagagcagctgataggggaatttgctaggctccgcactttcctaatataacctgccaagttttctcagcaaagtaggcttctggcccaaaggaatgagataaaggcaagttcttaaagaaaaaggattcaaaaaccatagcatccaacgatgaaacaggaaagtgtttctaccgtgtggaggaggtagaagttcacatggcaggatgtactttttatttatgcctcgtaagtcaaacagaacacaaaaaagatttgggaaagtgttattgccaaagagcgacatttttatgaggaaagaaagttcaagggttaactcttttccagttagtttatgcagaggctgcaaacacatggtcttgagggccagagctcacccacagacaggttttgttagcttgtcctgcaatatatttaaaaatgtgtatagatctgaataagttaccaaactttaaaaattagattttttgcaagtatctacatttctgattttccttcagcaacgggaagacctggcaatgctgggttccatgaggcactaaccccagtgagctgagcagtggccacaccctcccagcatacctgatccccaccccaccctaccccttcctgtgactgggctgaatataagttgccaattatcaacccacttgctatgttattttacttacagggaagagggaaataaagtttacacccacatgcccccaccaagagggaaaatgatacagaaacccatgtgtttcaagaaaaataggcaaatgcatgtttcttttagaagcaaaggccatcatgcctgcttaatatgacatatattgctctgtccagtttgtacccaggcattacctggctgcatcctaaagacagctgtatttgtattcccagagccttaagtccagtactttactaaccatgtcaagccgttgttgaagacatacacagctaagccatctggacaagagtaagaagattataggcttaaaagctacctatggtccctccccatacccttcagtctccatgcactatgatcctccacttatagactgggctccacgtgagaccatcctcagtttttagcctctgatttctcatcctctgcaaagctgagctcacgtgtttgtcaggaaaaagcatttgtcagaaacctcgtgtaggcaacggggtcttcttgcaggacagggtgttttgtcatttcctgcgtctgtgggatcagcagattggacagaactgttgttctggaacattcatatcaaagtctctgaagggaattgaagtgttaagattgtcaacattagttaccatgcagcatcagcctggggcttcgttcattctggagctgggctgcaactgcctgcttattcttattacatccaattccagctaagaatatgatgaccacctcggcagctaaaagactaggttatatcagtatccaagactttcttgataaaagttagaaaaccattagcattttttgaacatgaaatggtccagggatttaagcttgagataataatttgcaaaggaatgcttttatccccggggagctgtttggggagttatgggtgggctttttttttaaacttcatgttttttcatgtttgaaagagccagtggctctccatcactaagagagaatacagaacagtcatcaggattcctgacaagattgtgaatggcaggagttggtgcataggggtagggaccacccaaggggaccctggagagaagggggatggagcagcttcatagttcttatggggccagaagggatccaggggcacagattgcttttgtacagatggaatcattggctatcaggccaataagagagaaaatacaataacagcaaagcaccaaaccagtgcacaatgttggttaagtatggactgaactgtaagtgtgtgtatgtttgtgtgtgtgtgtgtgtgtgtatgtgcatgtgatgcgggggggtcctggaaatcatcagaatcggatgggctaatcctgtcaatctttctaaggaagatgagcttatttatttaactttctattgtggaaaatctgaaaaatttgaaaaatttgtaaaagccaacagaaaagtgtacaggaccccatgtccccatctgctcatcatcagccccaacaaccatcaacccatggccagttctgctccatccaaacccactcccatattattttgatgtaaatcttaaacattatatcatgtcgttcacaaatgttttggtatattgctctaaaatagcactattttattattttattttattttattttattattttattttattttattttattttttgagacagagtcttgctctgttgcccaggctggagtgcagtggcatgacctcagctcactgcagcctccacctcctgggttcaagcgattcttgtgtgtcagtctcctgagtagctgggattacaggcgcccgccaccatacccagctaatttttgcatttttagtagagatggggtttctccatattggccaggctggtctcaaactcctggcctcaagtgatctgcccacctcagcctcccaaaatgttgggattatgagcgtcagccacagcacctggccagcactgttttaaatatagccacactatcatattattagactgaaaaaattaacagtaatttcttaatattgtcatttatgtttccaattgtcttataaacaacataatttttttcagtttgtttgaatcccagtaagatccacactatgatgaggttgctgtgtcaggtgttgcttaagtctcttttaatctatagttttccccgcatctctttttattttcttctgctatatctgttgaagaaactggagttcatttttcaattacattttgaagtagaagaacagatagatgaataaataaaaggttttacctctgaatctcccagcccatggcagtgctttgcttttctctgttgtctcccttgctgtgctgcattgaaactgtgtgctgtgctattcctccaaccagtcaggagcccttgttcatgtagggcctgtgaggaagtggttttcccacagcaaggtgcagtgtgggggaaccagagtgtatcagagtccctatcacagatggaggatgtgtgtgaggagttagaaaacgttcccaaggtagctctgatacctaccccatgagagatggcgtgagtagcttccattctccacccctccctgtattcaggccatctgtggtgtgacttttcagtcctttcactaaagaggcaagtctctttcctcagcctttgatttggctttggccaagggatgtcagagatgtgatgtgcacagaggtgtgtgttaacacttatccatttgctctctctcctgctcctctaccttcaccatacgaggaggctggagctggtctgctgtaggaggaggcctgggaagctgagtccagctgccccgggcatcccagccaagtccatgcccatcctgatcagccaacagccaactgcgtcccacatgttcgtgggccctgctgacatcagagctgcccagcctaccagagcctgaatcactgacatgcagacacataagctaaacaaatgctttttgttttaaggcactaagttttatggtagtttgttacacagcattatcatgatagtagataactgatacaacccccctccttcttctctctctcttccacacacaaacatacacacacacaaacacacgctcttcaaattgagagccactgatttcagtctacagaagaaagactaaaaatgatagagataagctattaggatagtaggcaattaaacaatgatggtatggcttagagttcttgtgaaaagattgttctatagtccacctcctgatatgagcgggagattctaatgctataatagctaaattctgaagttagaaagggacaagactgaatgtgtatgaattattcctcagtgatttttgtgtaaaaatagtcattctctagacataaagaatgtattagataatcagatattaggcctacttttgtatttcttcctcaaaattctgcatctggaagtaactaggatgggggcgagagagaagatttttgcctttttatgaaagaaaatcttttttttttctgaataatgattgtggcaaattgcttatctctgattttaacaacagcaacgacaatagcaactgatggttcctgatgcttccctatgccaggccctgtgccagccccttctgtgcattacttcatgtgctactcagcacaaacttctgcaagaggaactagtgttatctcattttataaaagaggaaatgctctcaaaaaggttaaaaatatgtcctaagtttgcctaggaagaaaatggtggactgaaacctgatgtgtgtgacttcaaagccagtgctctttgtattatattccattaattatattatattattagttgtaaaattcttgagagaaggaatcacatctttactccctttggagtctgctccaagtctacttcccatgcacccagacggaataccctgtttatactcaataaatagtcattgaattgaaaatggaaaggcctaatttgtcctccaccccacccttggaaacctgatctttctccgtgtagcaaacatcttttggactcctcctccaccaggctctggttttcctgcagctgtggcagatggttctacaccaagagtgtcccacttctgccaccacagcagctcttcacttttctgccatggggctttctcccaagccagggaagcccatactgcctgaagtgagggcaggaaaggcagggaggaaggagagttaatgctccagggacatcttctgccaagggagtgggagctggtcggtaagcatcctagtctcccatctttcagaggggcatctctgaggcatgttccacacagttcccctgagggccccaggtgagactgagcctagttgtccacagtgatgacacatcttttattggctttttgccttccatctttctatccctcactccagctccctgggatctccttccaaatgaacgtcctgcatccaagtccttgtcgcaggctctgctttcaggattaaccaaaccaaagccttcctccccgccattcttggtgtctgattgttcaagacaaaaacaaggtattatctttgactcttccatctcataccccgtcatctccattggcaactcaacttttccctttctctatgcctgcccccatgctgtccccatccctcatccaggcttctccagtgaccctactactagtctcactgtcttcagcttccagagtgattttttaaatgtttatgccactgtgcttttctgctgaaaagttggtggtggtaataataacaggagcatttatgaagcattttctatgtgctatgatctgttctgaagatgttgcgtgtgtcaaactcacttaaaccacacatacccacacacaggcgtgcacacacgcactgtcatggtaacttacaccatctaaatcctcagatacttgctggcaacttttttctgtagccagagactactagtgaaaatgattttgctactcaagttccccacttgatagactctgacagggagactccttgggcatagaaaaattgcttcaaaattttaaatcaaaatcaaattagtgcgatccagagaaaaaatgaagactgtgacaagataatctacctgtattattaaatgtatgaaataacttcactgaaggaggtaggggaataggtgttgacctaaggaactttggaaataaatggaatgtgtaggactaaaggcaaaaggactgcacataagtactgtactcggaggaaattgtttctcacagaggatgggctaacaaaccagatatgatacatgtgcttgtaactaagcagttaagaatagcaaagatggaaaccaggttttttactcttggagcaggaatttacactgagcaaggagaggagactcgaatgacccatgtagtagtggattagagtgggagctatcaataacaactcatgtttaactcaatataaatacagatgattccatatgagcatatttatgaatatgcacatatgcacatagagtcaggcatcgcttaacaactgggacatgtcctgataaatcattgttaggcaactgtgtagtgtgaacatcatagggtgtgcttacacagacctagatggtatggtctgctacacacctaggctacatggtacagtctattgctcctacgctacacacctgtacagcacccgaatgctgtaggcaattgtaacacagtgggatatatctaaatatgtctatatttagatgtattgaaatgcatctaaatataaataagttacagtaaaaatacggtattttaatcttatggtaccactgttgtatacgtggtctgccgttgactaaaacattgtgtaatatgtgactgtatatttctttgttctgtcacctgagaggtcctaaaatcaatggcatctcagtaaccacaagcaacaagctcagatcttggatttacataccattctccaaaaaaataaaccatggttcctcgggaaaatgtctcattctagaactggggtaggagatatataagataagcctgaaacaacttatagtacccgaaaataaggcagtgataaaaaaattaacacacattgatgggggcatgtcaaaagaacacagaagccaacttaaagagctcccaattgccagagctggaacaatttgggcaacgaaataaatacaatcgcatcaaataaagtcaaagttgcaaaggtaaagttgaaaataaacatctagaaatccatactgatacaaataaatgatgcataaattaattaatgggagagaagagacaaatctccatgcagaatttcaagtaaattatgtagagtccagccaaaaggagatagagaacaacttcccgttccttaagcgtggatcacacatggtggcttccttccaaagggcacagcatgagacagggaaataaaagggtaatgtacagtggagaaacctgagaactacgaccttagccaggtgatcaatgtcaacatcaacagccgtaatcacattgatcatgtgtacccttgatatgaagtgatgaagcactttatctcttgtggtcttcctccctaaaatccaggatcccaatttgtcatgagaaaaacatcagagacatcccaacagagggacatcctacaatacacctggcccgtacttctcaagactgtctaagtcatcaaaaacgaagaaggtctgaaaaacttgcagtccagaggagtgtaaagagatatgacagtcaaacgtaatgcaagatcctggcaacattctaatacagataaaaagacattaggtagaaaactaagaaaacctgaatagactatgggctttgcttaatactaatgtgtcaatattggttcattaattgcagtctctgtaccacactaacgtaagatgttagtaataggaaaatctgtgtgtgggaggctatagggtaactctttatcatcttctcaatttttctgtaaattagaaactattcttaaaaaaacaaaaggcaggctggatgcggtggctcacacctgtaatcccagcactttgtgaggccgaggcaggtggatcacctgaggtcaggagttcaagaccagcctggccaacatggtgaaaccccatctctactaaaaatacaaaaattagctgggtgtggtggcgcatgcctgtaatcccagctactcaggaggctgaggcaggagaattgcttgaacccgtgaggcagaggttgcaatgagctgagatggcgccactgcactccagcctgggtgacagagtgagactccacctcaaaaacaaaacaaaacaaaacaaacaaacaaaaacaacaaataagcaaataaaataataagcaaaagaaaaggcaaattaagtgagttatacaacatatgcttacataccaccacatggaagtttgatgacttctggttcacctgccctaaactgtccacacggataactcagatttgaaggggagcagtactgggatcagagtgacctggttccacccctgacaatggtaaaattgactgcgggaattccaaatgagctttagtttgtggtggggacacacctttgacccatccaccacccctacaagaacctgagaaataagaatcctgaggtttctttcggaaaactctgtagagacccacagagaaaaatactgaaaggaaaataagcctgtcagcaaacttctgcaatacaaacgtggggtaaagcactttgagaagaacttctgatttacctgaactatgtccttcagcacttggtgaagctgtagacgtactgtcttttttatgccccaaaggccttattggggcaatttgttattgtaactgtgggaaacacatcacatttgttcagtgaagcaaatggcttcgcatctcctttgcgttgctctcggtatctattactctgctaaccatcagtgggtctccgtgggcccctcaaacatctcggacaaggagctggagcctcatcggctctagagagagggaaacagaatgagaagctcgcttcccacgctctcagcaagtgcaaagtttcatcatactcggcttttttttttttaagaacaaaaaatcaagctgacttttaaattaatagtttaacaaacttttaaagtaattgatctaggccgggcgcagtggtttaagcctgtaatcccagcactttggaaggccgaggtgggtggatcaagaggtcaggagatcgagaccatcctggctaacaaggtgaaaccccatctctactaaaaatacaaaaaaattagctgggcgtggtggcgggcgcctgtagtcccagctacctgggaggctgaggcagcagaatggcctgaacccgggaggcggagcttgcagtgagcccagatcgcaccactgcactccagcctgggcaacagagcaagactccgtctcaaaaaataaaataaaatagaaaagtagttgatcttaggttgggtgtgatggctcatgcctataatcccagcactttgggaggccgaggtgggcagatggtttgaagacatgagttcgagaccagcctgggcaagacagcgacatgtcgtctctacaaaaattttaataaaaaaaaaaaaaaaacaggcctgggggtggggggtgtgctcctttaggctcagcaacctgtgaggctgaggcagtggggagatcacatgaactcaggaggtcgactgcagtgagctgtgaccacaccattgcactccagcctgggtgagagtgagaccttgtcttaaaatgataataataataataatagattccatttccggttttccctctctgcattgctaacatgagagtttctacctgcatggggtgctgccagtactctgcctacgtgccctcaggcccttggccatgttcaggcacaactgtgactggggtgtcttcactgccaacagccagcacctgtgtctctttgagcactgtccggaagctaccggaactcactttgcctgcaggcacaggaacaagtagtgcctgggaattcactacccttcgggggcagccctgacctgtgactcgcagggcaggtgggttatagactgcagctggccagccctgagtggtcaagggtgtgaccttcaccggggctaagcccaggtttctctccgtgggactttgcttactctctcccctggctcaggctgcctcccttctccggtctgctacccgactcccaggtgtttcctgggattaatttctcataaatcactttcacacaaatccctctctcagggtctccttctgaggagcccaacctgagacatgactcagtttccccttcagggaggtgctgcccaggagtgtggctggctgaggacatgctgttctggggggcccctgccaaagactggacaaggtggggaggtggagcctggtcaattcctggcactttgccatgtctgcaccacagtttgggtggtaccctttatcccaatattgcactcaccctttttcattcgaaggtgctactacacagtaaatcctctgcactcctaactccatcttggtgtctgcttcttggaggaaccagcctaggacggtcttgtgaatgtcacgttccttctcgcaagcatgctgacctgtcctgggctacagagacaataattatgttatacttttgtttcccacttggtatttgcttgttttacctttctttgttaaattgcacatttactttatctacttcagagagaggttcccagaaaattctttctcgaaagttcttgtttcccattttttctccacattctgctgggctaacattttttttcagaacctcccgtttctctaaggacgggtaaagtagtcccagcctcactgatgattgtcaaggtgcatcagggcggcaagcacacctattttgtgttgggattcgcctgcctgccttcctgcttctctctctctctctctctttctttgtcttttgacagagtttcgctcttttgcccaggctgtagtgaagtggcgtgatctcagctcactgcaacctccgtccccaggttcaaccaattctcctgcctcagcctcctgagtagctgggactgctggtgagcaccaccacgcctggctcatttttgtatttttagtagagatagggtttcaacatgttggccaggctggtctcgaactcctgacctgagatgatccacccgcctcggcctcccaaagtgctaggattacaggtgtgagccaccgcccccggccgggactcgattttcttttgcttccagattcagggatggggaaaaaagagtccacatttctgaatccctgttcatttgttggcagagagaaaagcgggaccagataaaaatgagagatgagagagatgatgatgtttttacccaaaaatgctgtgcttacctgggcttgtgaagctccatgttttatcccatagagcatagtttctcaccctcagcactactgacattttagggtagataattttttgttgcagatgtcttgtgtgctgtagggtgttcaacagcatccctggcctctacccagtagaggccagtagccctcccctgcccctagttatgagctgaaagtttctagacacagtcaaatatcccctggttggcaaaatcgtcccctcgttgagaagcgcgacatagagctaaagcatcccaagaaagaggaggcagaggaacagtgctgacggcttccctttcctccacccattctgtcatggtaattttgttgtaaactctttttgcctttaggcaaggcagcactttttccatcttctttttgccaagggaacaaaagtctctcttctcccctgaaagcctctgcccctagcagctctgctcagcatgctgacagacccttaggtcacttggttctccaggagtagctgagagggagggtgacctcattctccacagacttacagcacggtcatgtggggatgttgctgagtgactccaagagactgtgagaaggaagccacagcttcagtgctgtaggataggggtgcccaattaataagggagcatcttaatgacagcttaattgattcagggggcgacaggtcagcccaatgagtaggaaacaggcttgggttctggttctgccactggccagctgtgtgactctgggcaagtcactttgtctctctgaacctcaatttcttcattcacaaaatcacaaggttgttatgaggattgaataagatacgcacataaactgtgcctggcactcaggaatctgtccataaatggttgatatatatggtgattggtgttggcttacattcttatcaggtatgcctcatctaaataaattatatctgtgccagtaaaatacttacgttaaagtatttaagtatttgaacttcaatgtctctccacaaaagctgacggatggctgtacttactgtgcacagtgattgtctttctaaaatacatagattattctggttgcaatgtgggttagagatgcaaggcagggtggtgaggaaggggccattagccatgtgggtggtgagacactcaaagggagtggaattttggggaatcactatgctaaagaaaagttttgcacctgttcctcaagtgtgattcagcttttcttctagaagaatgggacttctggccagatgtggtggctcatatttataattctagtgattcgggaggcaggggcagatcacttgaggccaggagttcgaggttacagtgagctacaatcatgccactgcactccagcctgggcaacatagcaagacgttgtctctataaaaaaaactttaaagaaattagctggcggccaggcacggtggctcatgcctgaaatcccagcactttgggaggccaacgcaggcggatcacttgaagccaggagtttgagaccagcctgaccaacatggtgaaaccccgtctctactaaagagacaaaattagccaggtgtggtggcacatgcccgtaatctcagctacttaggaggctgaggcaggagaatcgcttgaacctggtaggcagaagttgcagtgagctgaaatcacaccacggcactccagcctgggggacagagcaagactgtcaaaaaaaaaaaacaaaaaaaaacttggaaggccaaagccctctgggtctcagttgtccttatctgttgaatgggatgataataagagtagcttgcaaggctccaagcctccagggttgtttgaagtgtaaataggttgctggaaagtgcatagagagctcacagagcaatgcctggaatagatgaagcattcagtaagtgtggtatatgattgctagtaaatccatatgtgctgtcaaaggagaggggcgcatggctgtgtgtgagaagcaggttgagggaactccttcatgcattgcagcacattcagcagcgttgccagccaatctctacttgatgccagtaccacctctttatcctctgctttgaaacctcaaatgtccccatcattgccaaacgtcccctgggaggcaaaatctcccccagtggagaatcactgatctagaggaaactggtgaagccaatgtagcagatcaaatgagaaaattccagggtagtgacatgaacttgacttttcctggagagtaattaactaggcagagacaatgccatatgaatgaaaatgtttcccttctctttttctggtaggtcaagttgaagtatatgtgtgtgtcatggaaaaacaagtctaaaaagagaaggaacaaaaatacctctacaacggagagctatcttaaatagcaatgtttttatggcatgtgattgaagattattaagattggtaatggaaactggaaactgtcacctctagggttgtgtgagtttgtgatcctggggtggcttttactgaggtcgtggagggctgatgtctcttttggctttccctatatcccccaccccctgccccaagaatatgccaaacacaggcctcatgtctcaacctggactatgtccccgaggccactggggaatcaactttttttttgagatggagcctctctctgtcacccaggctggaatatagtggtgcaatctcggctcactgcaacctctgcctcccgagttcaagtgattctcctgcctcagactcccaagtagctggaattactggggcatgccaccatggccggctaatttttgtatttttagtagagatagggtttcaccacattggccaggctggtcttgaactccagacctcaggtgatccaaccacctcggcctcccaaagtgctgggattacaggcatgagccactgcatccggaggggaatcaactcttttagggaattctggaatgctgaaaaatgcccgcgaggcctgggaaacaatagccccttccccatattcaaggtggtctgttcaaggtggctgattaaatttcttgctttggaacattcgacagtgattttttcgagcagaacttctcagactgtgatcacttggggaccttgttaaactacagaatctgatttggaaaaacagggtggggacctaagactgcatttttcagaagctcccaagtgataccaacaccgctggcccatgggcagctctgcacgtcgcagttctggtgcgcaattctgcatcttctttttcagtgcctaaaactgaggatcttccacaacagtttacaagcagtgaaggggcatttttaaccactggaaaaataaacagccaaggtgtgtgtgtatgtgtgtgtgtgtgtgtgtgtgtgtgtttttaatccacaccaggcaggcatctcctcttactctcctgcagggtatgtggaggcaggatggaccgtggtcaacactgcaagtgtttcatttcacctgtggctttatttctttatgccctcctatatttcggttaagtgtgcaaccgagtacaaattcctttcaagagaaatagcagaggcagaaagtgggtagggagggagcctgcggggaatgggagaggggagagcctcccccagctccaggttgagcccccgagtcggtcctggcacgtgggcgtgcgccggcgctgggggtggccaccctgtgtgtggtgtgtggggccatttggaaatcccccatgaatgactaggaggggctggggagatgagtggcccaaggcattgctgtaaactacactggtttcccaaaggattttgcatgtgctcacaaaagtagtaaggataacctgagccctgtgggtcctttatgaacgaggagattacggtcgggctttgccacagcctaagtgtgcagtacaacaaggccattgtacagctcgggcattcatattgaaaataaaatattagctgggtggtccggaataatgaaggcatttatgactctggctaagcatatgtatgtcggactgatccacagattaccgttacagagtctgggctcatgcggggctccagagggctgaggccactggtatagatctgggatgaaaggaccaatgatcaaagagactcaggaagactaaagagctgtttatctgtgacctagggatacaatggaatgaggaatacgattctattgaaaaccaggactggtttccaagagcgtccttaaaaacgccgaacttcagagaaaatggtctcaatccagcactcagagggaaaagcacaacaccagaaaaacaggcggctgcgaagggctttggaagccgtgtgaaccggtgacccgagctcaggtccacagttgggatacaggaggacaaatcactggctaggccatgactcggtgagtgatcgtgggtcagtcacataaccttttgtcttcctcatctgctgaggacagaggttgaccctgggctctgacgttaccaggcccccagcaggatgcagcacaaagatcatacttgctccattccattttgcctatgaaagaaaatttggaggcctggcagaaaacctctctacgaatgcgggtggggactggagttttctggaacaggagcaccaactgtgccaggtgccacaccttctttcctgcctgaggagaaatgctttttcagtacacaattcaatgatttctgatatgagtgtacacccttgaaaacttcaccctggaaaaattatgataataaacatagacaccactcagaagttcccttatgccccttataatcctccacccccaactgtcccatgcctagatctgctttctgtcacactggattagttttcatttcctagagttttatataccgggaaacaatatgtgtcagcacagcatggctgccttcatgcaccatcatgattttaagattcatcgctgttgtggacatcagcagctgcttccttttcaccgtcgagtagtatgatctgttgaagaacatgtggattgtttctagtttgcagcttttccaaataaaggttccatgagcattcatgttcacatctttgtatggaaataatgctttcatttctcttaggtaaatacctaggcgtgaaagggctggatcatatgggaagtatgtctaactttttaagaaaccaccaaattattttccaaagtgtttgtatgattttacacttctatcagcagactaggggagttctaattgcttcacatctttgccaacacttgtggatttgtagagctatctcagtatgattttaattcgcatttccctaatgatgaataatgttgaacatcttttcatgtatatgtaagccatctcaaaattttctttgaggctgggcacagtggctcatgcctgtaatcccagcactttaggaggctgaagtgggaggatcccttgaagtcaggagttcaagaccagcttgggcaacatagagagaccccatctccacacacacacacacacaaatttaaaaattagccaagtgggcgctgagcacctgtagtcccagctactagggaggctgagggtggagaattgcttgagcccaagagttcgaggctgccctgagctatgatggtgccactgcaccccagcctgggagtgcggtgtgagaccttgtctccagaaaaaaaaaaaaaaaaatctttggtgaagctccagttcaaacattttgctcagtttttaaaaattgggttgtgtttttattattgagttgcaaggagttatttatatactctaggtacaaatcctttctggttatatgtcttgcaaatattttctgtgcctcaagggtcattttgagagctgaaggaggggagtggtcctcccaggctggtgtgttgccttctggagtccctgctaatttaggagctgcttctctagtccagaacttcctttggttcttcttatcacagtgagttggaaacaccaggtcaccttgaattctacctcaaggcttctagggcctttgtgagccacacggtgcagcaccaagcatagcctgaacactagacacattttctcaccctctgcctgaaagcaggtgatttcgttatttagaacagctcagggccttagcgtgaatatttggagagggtgatagagaaggcactgcctggtacctgcagttgggcctgtcccagtacaagcaacaacatattaaaaagaaaggaagtatttggagtcctttgatgcctctagttaaaagctgcaggccaattgcaatctctaatctccactctctttctcatttgaggcaatggggctatccttccatgattttcttgccttgtttattaacagttcgggggcagtttttccctgttatttaatagaaacatgaaaaagcaagcatcttgcagcagttatcaattactgcataacaaatgatcccaaacctcatgggtcttaacaaccaccatttgttattgctcaggaggctacagttctgttgagctgtgtcaggctcagcaggtctcagctgggctcactcgtgcacctgcagtcagtcacgtgaaatctcagtctctccgtctgcaatcgactcaacagaatgaagacaccatattgcccattggccttgctgtttctgtctccatggttctggctcgattccttgcagtactgacacttcttccagcacaaccctctagtaagacagcctggattccctctcatgagcttctgggctcagagaggtttgtagatatctgggactgttttaatttgggttctgagtagcagagcctgagaaagtcatttgagtgtaagcagtttattccaggaagtaccaattaggacacagggaagtgagatccaggagggaaggcagccaatacagggtatattagagaggcagctactattgttggaaatagggcacaatttcccccctcccggggatatgcctcagggtggtttcatccaggggcaaagaaatggaacctttgctgggactagggagagggccatgggagccactctgttttaccaagattttgcctctgtggcctctccctctaggcttccctgcaaaggaattgccgatccctgtggctggggttgtagagtcagccaggcttatactgacatatttaagttcagcacagttgataatgcttgcgatgtctagggacccagagggtaatcacagagtacaaatgaacttaaacaatgccagaagcaagcctgacttgtttttttcttggggtataatcatctaaagccacttgtgagggacagagggggctggatttttgcatttatggtacattgactgcatctattatgctttttttctttttttttttttttttgagacagggcctcactctgtcgcccaggctggagtgcagcagtataatctcagctcactgcaacctctgcctcctgggctcaagccatcctcccacctcagcctcacgggtagctgggactacaggtgcatgccaccatgcctggctaatttttgtattttttgtaaagatgggggtctcgccatctcaaactcctgggctcaagcaatccacctgcctcggcctccaaaagtgttgggattacaggcgtgagccacagtgcctggccctgttccagctttgctgtggataagcaggatgggatgtccatcataagctgcttctctttcatcttgagcacgcatcatcaaatagaggtcttcttttaatgaagcagcagatatttttagtgatttatcatgaaatattttgttacatggagtgatggattaccacataagttagattagtcccttgcagcctcatgattcgaaagcccacaatttgagcagttggatgcaaagtactttaaaatggcccagtttctcagatgagattgtgtcagtttccatgatgtgaacttctgagcttgttctgctccaaaaatgaagcataggttttgacaagtccttgctcgaatccttagattctttctcagaccttgactgaatgtccctggatgtgcacatttttctggcttgtagattttcaccatctcacaaggctgcctgggattactgtttttcatgccttgttccatttcttgcctataagaggatgctttccatctatagtatagttttatagcaatctgagtagtttctcattgtttcaggctgagtaactttagcaatatcagcctccctatgtaggttaattgattgacacatttatttaatcaggaagtgttattgagcgcttcaaagggtgcagcaaccacaaggccccacatttgctcacactgtcccaatgccaaaaattctgtcccattggttctgcacagcttcacgttatcctagaaaatgcaaaattttgtcttgcttcaagacgacctctttcagttggtgggtggggggtcccagacatacttcatcaggccaggtttcctaatttgaatctaggaaagtataatatgagaaatacttcatctgattttgttttataatcacttaagaatatttatttaagccaggcgcagtggctcatgcctttgggaggctgatgcaggaggattgcttgagtccaggagttcaagaccatcctgggcaacacagggagaccctaaatctaaaaaaaatatttagctgggcatagtggtaagcacctgcaatgccatctactcaaaaggctgaggtgggaggattgcttgagcctgagaggtcaaggctgtagtgagctgtgttcgtgccactgcactccagcctgggtgagcagagtgagatgctgcctagtatgtgtgtgtgtgtgtgtgtgtgtgtgtgtgtgtgtgtgtgtgtgtgagtttccaaagccaaatctttgattttttcactttcttcttccttgtgtcctacagataaccattcagattttttcttatttacctttccattttaaaaaatgtaagcaaaatctatatatgctaacgaatcacatacacctctctctgtcttgtttgtgtcatttaatgaagtatactggagactactccataatggtaaatgttgatttttgttttagtcagggttctttctccaaagaaacagactcaataggatgtgtgttgggcaagggatatagttgtatatatttgtgtcaatgtgtacgtatgtatacatagaaagatatttattacaaggaactggctcacacagttatggaggctgacaagttccaaggtctgcagggtgagtcagcaagctggagacccaggagagatcatggtgtggtttcagtccaaggctggcaggctcaagactcaggaagagccattgtttcagttcaaagacaggaaaaagctaacatcccagctcaaaggatgccagacagaattatcttatgcaggggagggccagcctttttgttctgtttaggccttcgactgattggctgaggctcacccactttagcgctagtaatctgctttactctgcctacagagttacatgctaatctcatccaaaacacccagaaaaatgactgaccaaatatctaggccccccccagggtcccatcaagttgacatataaagttaaccatcacaatattcttcactccctttagcagatccattgtatgaatgtgccacagttgattaaaccaatctcttgttgatggacaattgattatttccaatgttttgttatgatgaagttctgtgatgaatcgccttatgcatacatatgctgtttgttgcactgtacttgtaggacagactcctggaggtgggattgctggatcagagcatgcacatatatataattgccccttgctaggggctgtatcattttgcattccaccaacagcatccgaaagcactggttgcccaccacccttggccaaggagattgcgtcagggccaagctggccaataagagggcttggtgggagttttgtgaaaatatcaggacacagaagctgtctctccctggggattgctcagctaactgctggaagctttgtgtctcttggggctaccacatggagaaagccagccaagaataacaccaagaaagaaggagcaaagacagaaaaaagagacacagaaagaaccaaaagacagagccccaatggattggtggagcgcctgagttcatctggacctgaatcaaaggctaattctgcacttttcaattacaaaagcaaaaattcagatttttttttttttttttttttgagacagagtctcgctctgtcgctcaggctggagtgcagtggtgatctctgctcactacaacctccacctcccagactcaagcaatcctccagcctcagccccaccaagtaggtggtactacaggtgcaagccaccacacctggctaatttttgtatttttttctagagatggggtttcaccatgttgcccaggctggtctcgaactcctggactcaagtgacccacccgccttggcctcccaaagtgctgggattacaggcatgaatcactgcatcctgccaaaaaattttaaaactctggtttgaatttgtttttcacacaaccccaaatcctgtccaatccaacatcctacataaaacatgatttctaccttcaaggacttatgcaactgaaacagaagacagaacgaatgcaggaaaaactacaagaaaatagagaagagtactgcattggtagtgctttattttatggtatagatcatgagccccgtgagtccttcagaattcagagaagaggtcatgaaagaggaggggcatgaagtgggccttggagtcatacgatttgaatggacaggacattaaacagtgccacaatcccttgtctgccatttgaaatctgagaaccaacagtttttggagagtcggggcagactccttatgttaaacatgcagaagcagaaattgtatttcattttatttttaaatttttttaattttaatttttgtagactgggtctcgttatgttgcccaggctggtcttgaactcttgggctcaagtgatcctcctgcctcggccttccaaagtgctgggatcacaagcgtgagccaccatgcctgtcctagaaattttaaactgattgattaaactgggagtgtggtcccagactcttccaggggtgatatgtcaaatatgggatatgaactgttcaatttctgatacttatctggcctaaggagtttgtataggagaccacgtatctgtgcttcatatctcagggaaacgagggatgtgtttgctgaggcctggctgtcaggaagtgtcagagaaccccacaggcactacttgaaaggtgcttgtcctacaggtagctggagaaagatggttacatccaggctgggtcactctctgctggatatactctgccccgggctgcctccttcagggggtggggggaaagggactatcttctaatttgcacaaaagtgccatgtgatgtctcagattcctcttagcctgggctctccttcaaggcagagcctgagacaagggtttgagccaactggtttacttgggaggtgacccagaaagccctgtgaagagtggggaagtgaggcagggaagtcaataaagggtttgctcatgagtgagttactgcagagggccgctgggctcactgctgccagggacctctgggagacagtggagcacacatcagaattgccccagagagtggggaggaagccacggcgtgtactcaccaactggtcgaatgttgtcttgggggccttaagtgctcaacacttcctggcctccctgcagtcctcctgtagagaagaagggagaggctggcatattcttgaagtaggaagctcccagtgtgcatagaaattgcccaccaactggaggtgagcaccgggtgggccaagagaatgtggcccacagtatcttcttgcagagcccctgctaaacactccctccgaggctttgtctatctcggttgaccacactgttcagtgcttcctttccctttccacctatgagctccctgagcttagggactgttccctttcatagctgtatccccatgcctggcatggcggctgggtcagatcgttacccaccacgggttcttgggctctcaatgcaataggaattgtcatgaggccaaaagagctttcccaaacaaggctttatggggctgtgcccaggcataagggaggcagctcagggaaaggattccctagctggctccctggagggtgttggaaaggcatttttataggggccacagcgggaaaggagtggcgttaggcatgtagaggcgggaatgcttagcacccgtgcagatgaaaatacacttcttcctgtgtcacgtctcattaggatgttaaatctctacccgggtgtgatttttggtgttataatgaagctaagattaagggtcagtttttcttctggccttgtgggtatgcaggcaatagggttaactcctttgagtaagatttaaggtgggagctgcttattttagcttcctccaggtccctcaatctgtaggtatggcgccttgagcaggatttatggggcaaggtctggatggcctcgttgggattccctccagccctggggcctcccggtcaccagcttgtagtagacgtcctcagtgagagacaagtgggtggggcccaaatcatctccctaccccgtctcaggatcagcgcccaggtagcatgtgccaggtctggggttcttcctgcgtactttactcctattgttctccaaagtgtgcactgcaggtaggacaaccaaatctcccatcaccacttaatgcggcgagggttggcaaggaattccactgggtacctgtctctggaggctgaggccggaggctgtgtggctaggctgactatggctctgcctggtacctactcctggccaggggcaaacctttcctttaggtgttttggcagagtcagacagggttgctcctcacattccacacaacagctctcgccttcataaagcacttaaaggctggttggctctctatgggtttccaaagaggagcagacttcctgcagtccagatgtctggcaggggcctggtccttgtgctggttccctctccagctttgttgtgatgtagggagaagcctctctgtctgtttgggataaacttaatcctctaaacagcaactgatccaaaatttccatataggcggggtctggggggcagccatctggttggaaggaagattagggaacttgtattagaactacctctctctaatgtatggtgagcaccctggtttccctttggggtggctttatagaggggtcagttgatattacaaggaagctaaaggatgccgcctgtgatacctgaattccttaagaacaaggcatcctgcagggagaatttgcagaaatgtgatgggggatgggcagagcgaagccagaggagaccttgacagtcggccaccaaatattcacccgacctctgctagatttgttcttgacaatgcacttttttgtaggcaaatcaagttatcgctctgttagaaagaataacaatcactgtcaaactccaatgaagacctatgtttttattgttgtgatttctgataagtcccctggaccaggccctgcagtccagaccctcgcctcgccagctgcttgtgctgtggaactgcctccatctgtctccctgtgaaaccgtggttagcacatcattaacccatctacggagatttcagaatttataatcctcaatcgttcacagaatgaaaacagatgctttgccagaaattcactatcaaagagaagcatttaatattggtaattagcaaattaaaaagaggccaaagtgcccaactcaaaccaaaattcttccccacagagtaaatgcagtatgatttgaagtaatgaactgcaatcatctctattttgtagcttcctacccttctgtgtggaccaagaaaagctcctgcttacaattttgtacaaaggagatgagatctgtcaagaatatttttaaaacataccactgaagagatgacccaaatggctggggcatctactgctggaacaattgctggcattatgggatgttgcatgcactagccactagactccatcaaagagttgggctgcataagctggtgtgggttcagatgccaggaagagttgctatgacagcaaaaaatttgatgtcctttggagggtaaattcttgattgagggacaaaattaaggggatacaggtttgcatagcacattgagagatagaaacttcccaagtgattcctaaaaaacaggtgcttatggaattgctaatgttctacagtcacatggaattacatggctatgtgatgctttccttcctctgcaggtagtgcagactttgggatgggagattctgttttaaaatggaactcttctacaaaaggagacacttcctgccctgacagcatcagttttaacatctgcatttcagaagtagaatctcagtttttcataagagaactagttttttgttgttgttgttgttatgttttgttttgttttgtcctgttttgagacagggtcttgttttgccacccaggctggagtgcagtggtgtgatcatggttctgtagcctccacctcctgggctcaagtaattttcccgccacagcctccaaagtagctgagacaacaggtgcataccatcatacccaggtaatttgtattttttgtagagatggggttttgctatattgcctaggttattctcaaactcgtggactcaagagattctcccacctcagtattataggtgtgagccaccgtgcctagctgaaaactagttttaaaccacaaaagataatatatatttatggactttaaagcaagtatgtcctactaaggtaagagaacaagtcagtgggaaacaggaggtatctcatggacgtatgtattttttagcattctctaagcagctaacatagaagttcctgtttctctgtaactcggtccctgaaagtcttcagagggttttgtggcctggaaactggccatctcaagccattccttgcaatagcagtagtctttcaacttttaggacgatgacaacaagatagatcataccacttatgtgtccctttttaaaagaaaatatttgtagttcaaatataaaccctgtgatttttaatattcatagtgtggataaccaaggcaggaagtcaatgccatttacagaacaattctaatttcaaatattccatccccttgtctccataaaccactgaaatatctcagaaatcccagtatgtccaatccaggtagccattaaaagaagttcataagcattataatgactatattcaaaagtcacatcagatcaacaatgattctaccatgattattatacactatgtgcacactagctcttattctttatttattattgctgagtttatttagtgtatttgggctttgttttttgagttataaagctcacgaacatctcactgatataaatgcctatttgaggccaggcgcagtggctcatgcttgtgatctcagcactttgggaggctgaggcggacagatcacttgagatcaggagttcgagaccagcctggccaacatggtgaaaccccatctctactaaaaatacaaaaaattacccaggtgtggtggtgcacacctgtagcctcagctacttgggaggctgaggcaagagaattgctcaaacccaggaggtggaggttgcggtgagctgagatcgtgccactgcactccagcctgggagacagagcaaggctcctttttgaaaaataaaaaaataaatgcctattcgattgtgactataaattcaatgtaagttggtgctgacatcctaaggatgacaacatttcccagcccagttgtacatagttcaaatttaaaaggatttgaaatattattcaattataaaatgttatattaatgttggaatgaatgcaaaggacaggagagaaaatgctttagagcagctttctagaaggaaagcatttgataaagttgctaattgcatgaaagctgacatcagttttcatactgaatctaaaaagattcagttagctgtcagacctgcaacttcaagtgccgcagagaaggtatttctttttaaaaattttaattttatttattttagagaagaggtcttgctctgttgcccaggctggagtacagtggcacaagcataactcactgcagccttgaactcctgggctcaagtgatcctcctgcctcagcctcctgaatagctgggacaacaggtgcatgccatcacacctggttagtttttaaatgtttatttttagcagagatgggcatctcattatgttgcccaggctgttcttgaactcttggtctcaagtgattttcctgcctccttagttgctgggattatgggcatgagccaccgcacctgtcttgggaaaggtatttcttgaagctgggccatccaaatgcctgtttcccagatagttgtgagtaggttggactattcttccactttctgtgcatatccatgcacatcgtcctctgcttgatctatttgctttcacacacttctgtcaatttcatcttcttaactccatcacctctctcctcaaaattctccaacgacttcccatggcctaagaaaatagtctacactcttcaggctagagaagttgacatcacctatccaacaacctttcttcatttctgccttagaacactaagtttgttctaggaagcaatgttcagttaaaagatgacattttccagcctcccttgcaggcaggggtgacttatgagatgtagactattaaagcaaactaaataagtcttgagaagaattctgtacttctatatttgagtccttgtggatgaacttcaacctaacttactaggtagacaaggctgaaaccctaacttaggagtatgcacctgtaacaatcaatgagtcttggccaatcccagaggcagtacttcaaccagtcacacactgctgagtgttcaaaccgtgttgaaataaggcaaacgccaagttgtaaccaatccaagtagttctgtacctcacttccaatttctgtacatcactttacttttttggtctataaatgtgttctgaccacaaggcatccctggagtctctctgaatctgctctgattctgggggctgcccgattcatgaatcattcattgctcaattaaactcctttaaatttaattcggctgaactttctcttttaacaagacaaggtcactgggactcccataataagctattttagcagagctgactcagctggagggatatgacctagcaccttttcactcttcccttctctgaattggacctagaatgcagacaagatgtaactgccccatgggttagtcctgcccatggcacagacaaaaccaactcactgagactacagcattgccataaagaaagacaaaaggccagccatgccatgtgggagatggagttattactcaaaccaatctccctgaaagtttggcaggcaagagaatggaggtgtggaaagtggtcctcttctgagtgaggccacaggatgtttggcaggttcaggtggagccatcatcctcagaaatgaaaaaaactaaaaagatatcccaaaaggccagtcttaggttctacaataatgatgttatctgcaggaataattggggagttgcaaatcttgtgacctccagaaaaatggctgataatcatttatgtctacaccttagcagaatccagtctcctctttctcctgatctgattctttcattagcttcccaaaggcagtttagtttggggaagggctattatcattaaactataaattaaatgtctcccaaagttggtttggcccaggcccaggagtgattaagggcagtttggaggttaaaggcaagctgagggttggttaggtcagatctttcactgtcataattttttcactgttataatttttcaaaggcagtttcaaagatggctggagctcctgtgccaacctgtgaccctgaggatggagaagcagcaagagtctgggtccctaaagcactggagggctgacttcctggcttgttttctgtaagagaataaccccctaatatatttaggttgcagtatttggatctctatgaaaagtgctaacccacttgctaatggatatgattggcattgaaggatctccagacttgactccaatcttcccttctggcatttacatcacatattatttctcagtcctagctcgagctactctccaatcgggactcctaccaaattcccatccaggtttaccaacaggcacattccaatgatccatcttctacttcctcccaaagaaagtgtaccatccagaactattgcttctttcacccagcatttttgcataggtttaaggatgtaagttctgatatcagactctttggttctacttctgactacctatgagatctagagtcggtgttgagtgtaactgcccaacaggttctccttgccagctgcctaggcagccaatttatcaagacaggagaactgcaatagagaaaaagtaattcacacagagccggctgtttgggagaccagaattttattattactcaaatcagtctccctgagcattcagggataagagtttttaaggataagttggtgggtggtggagccagtgagtcaggagtgctgattggttgggtcagagatgcaatcatagggaatcaaagctgtcctcctgggctgagtcagttcctgggtgcagaccataagatcagatgagccagtttatcgatctggatggtgcctgctgatccaccaagtgcagtgtctgcaaaataagtgagggtacagaagtccttggtaaggttttccttttaatgaaaagcagccccaaattattttcctttctaacaaagaacagcctgtaaaatcaacaaaaagagcagacacagatgccagcacttgtgccaatcatgttcaagatggtggctccatcttccttctctttgtcagccacgtgtacagtaaggagcagacaagatggtgccagccaaggagaaagtttattagcataataagattagtgtggggcagccagccttcttcgcatactgtgtaaatgtcataactgatggaatcaatctgtgagccttatgtaaattaggcgcctgactataaaatccagcacatccaccgccagcctgccttttcctctaggaagtcccctctttcttgctagagagagagttatgttcctctctgtttctttctctttcttttgcctattaaaccttcgctcctaaactttttgtgtgtgtcagtgtcctaaattttcttggcgccagatgacaaaccgcgggtatttaccccagacaacgtagctgcttcaaggttatcctcaggagcaatttggggagggtcagaatcttgtagccttgagctgcatgactcctaacccataatttctaatattttggctaattttttagtcctacaaaggcagtctagtctccaggaaagaaggaggtttgtgtggggaaagggctgttatcatctttgttttaaactataaactgtaaacaaagtttctcccaaagttattttggcctatgcccgggaatgaacaagggcagcttagaggttagaagcaagatattgttgattaggtcaggtctcttttactgtctcagttataattttgtaatagtggtttaatgaggacaatgaacatcataaactcattgcaaggatacagattgtattaccccaatttggagagtagacgatgcttagaactgagaaacccagacaaggcacttataaccccatttccacaaaacattggcactccatccgaaaaagttttaggagacacaccatttatctgctttgagtttcctttatacaaagcaatggtttattgagatttgggaataatgagaggaaaaagggaaggtttaatatttttaatggcttcaattttttaaaacgtttatctcaagagaatacatggttatcaatgcactgaaaatcgtccatgaactggtaagaaaacctaaactcatgtgttttcatagacgctagcatacaatttttctttttttttttttttttgagacagagtctggctctgtcgccaggctggagtgcagtggcgcaatctcggctcactgcaagctccgcctccaggttcatgccattttcctacctcagcctctccgagtagctgggactacaggcgctcgccaccacgcccgactaattttttgtattttcagtagagacggggtttcaccgtggtctcgatctcctgacctcgtgatccgcccgcctcggcctcccaaagtgctgggattacaagcgtgagccaccacgcccagccagcatataatttttctgttaaaatgaatagtgcattcgctgtgaccaatactgggataatagctcctacctttttgtgtgttgccagcatctagctactttattgcattttcaaatgtccaaactcattttctcaattttccttaacacaagagcagataagcaaggaggcagtaatatactttcattcagcagcttctgcagaggcagggtctggaagcagctccctgggatgccacgtaagctactccatcgctctgagtcacagtgatggaggacttggacgagatggattttgtcaggttccttccagacataggaatttaaagacatgataatttgaagatgttacctaagtccccaggaagagaaagagctttcataaacaatgtaatcatgggagtaattcctccagggatcacaaggatttggctctacctgctgacctttttctgtttgatctttcactccactaagagaatccattatctatagaaaagaagccactttccttagagtcattgggtgaatcattgctccagtgaatggttactgtgatgggtaattctgggtgtcaacttgactggaccacaggatgcccaaataaacactgtttctgggtgtgtttgaggctgtttccagaagagaatagcatttgaatgggtgggctgagtcaagcagacgggccttcccaatgtaggtgtgcatcgttcaatccattgaggacctggacagaacaaaaggcagaggaaggaggaatttgctcccttttttcctgcctaactgcttgagctgggacacctcatctcccttctcctgctctcagaccggaacttataccattggctcccctggtcctcaggtgtggactaaattatcccatgggctttcctggtcctccagcttctgtgggacttctcagcctccataagcacgtggtgaaccaattccttgtagtaatttctttttcttctgtttggttcttatcagttttcctatcggttctgtttctctggagaacttgaccaatatagcctcaatgctctattttctaaaaaaattgaaatttaaaaaagttcagtttgataattaaaagtccctctgagacagagtaggaatggggcttggcttcaactcactcccgctagagcattctttcactcatctccacgattgcaaaacctacaccactacctcactgatgtcattatctctgaaccatgccttttacttaaagaattccaggaactggccttgggagatcaccaaggttgcggagtgtcccagcttgggaaggaatgctaaacaactgatttacagacttgctgccttctgccagaccagcagggggtccattactcaggataaccccagcaaccagataatgcctacctgcataccctactccggctgtcaactcctgtgctttgcctaataaaaaagccctacaggctcttgtcagaaagtcagccagggaattctccctctctctctcaatctctctctctctcattgtctcccttatgtccaggcataagctccaatgaggccttgtctggaaaaagtcttctggcctcacctcaatctctaacatattgagagcccaagagcctgtgctcagtaacacctctaacgcaaagataaggttagatcttaaaaatagggtgaaaacatgaggcaattaacttttagtaatgtcttcataatgttttctttaaatttttaccaattttccattttattatgatcctctgtaatatgtaccaatcaattaacataacctcattttactcaaaataaatatgttttatagacagaaattcagtgtctttctttgtctttttaatttgtcatgtcctaatacaggtataaaacaaaaagtatctgagacaagttttaatcaatttaaatgtttattttgccacaatggtggatgtgcccctgacacagccccaggaagtcctgagaacacacgcccaagatggttgggttactgggttactgcttgattttatacactttaggagggacagaaattacaagcagacatcaattagtatgtgtaaggtgtacattggctcagttcagaaaggtaggacaacttgaaggatggggagctttcaggttataggtggattcaaaggttttctgattagcaattggttgaaagagttaagttattatctaaagacctggaatcaacagaaaggaatgtctgggttaagatacgggattgtggagactaagacttttattatgaagatgaagtctctaagtagtaggcctcagagagagacatgtgaatatttcttatcagacttccaggtgccagactcctagttagtctctcctgcatcaggaaaagacctggaaagggaagggggattctctacaggatgtagatttccccccaaagagacagctttgccagacgtcaaagaaatatatttcagggtaaaatgctttgatttatttcagggcctgctatctgtcattttgtggtgtattgcattgctacaaagagtctgtttggtcagtcttaagatgtctgttttaatgttaaagctggtcagttccgcataaattccaacaggaggagagtatagtgaggcatgtctgacccctcttcccatcatggcctgaacttgtttttcgggtttgccttggaatgcccttggccaatggtggggaagtccattcaatttgttgcagggcttaattttatttttggtttacacagggctgtgtatacaataaattctcaataaatccttgggaacaaatgagttgttaaatctcactcctgaattaatacctttcatacaacagacttaaaagtactaacaatgtaaatgaatctcatgtcactttcataagcaacctcagcctgtttaacaggtagatagtatgaacatcatattggggctcagtatatatcacaccaaaatatgactgtagagagtttccttaggccagaaatcaagtcagtgttcaagattttaagtgtactgagatgatttcatttacttaagtttttcttaatgcaatctgctgagaaacaggtggtaatttgggagttcaaggttgtcattaagtttttcacttacttttaactcccttataagtaataatagaaataagtcatcacattcatggaaattcattcctgtgctttacttaatcacacataagcctttgctgacttaaaaaaaaaaaaaagcaagtgacctgctatatatgtttatctcctgtggctgctaacatcctgttaaacgaaaattatgggcgcccatcactttagactgaacttcctacactaggccccagcagaacacacaaaatcaaaacaaagtcactcacacaaaatgccacagagtcaaactggaactttaaggaaggagatagatcccctaacagaccagaccagttttttactgaaaacaggagattctagtctacctgagtgagtgtaataaaaatggtccctttgctttaacctttacagaaaaaagtaatccgaaataacctgaagtaacctgacaataaccagtcagcattttttcctatggttttgtctccctagtctaccttacaaaacccactgttctgccattgctcagtgggaactctcattctgttttgtaggatggaggccacccctattcatgaattgcaaataaaagccaattaaatctgtaaagaaatttgtcatcatttctgccttttgaaaatctaatggaaacaaaagtttaatagtgcaaaaagaagtaaacccataaagataaagagacctgagggttatggatgagtagaagagagatcccaacaaatttctgggaaaatttcagtatgggaaatgtgttggctggcaaaacagagcggacagagcagctcggatgatgttaagatattgtgtgaattccaagactggctccagttttggagttggcaggcattggagggagtgaggaatgggctgaaaacggtgggaatgacagagtgtttgcacaactgctcccaggggtcttatttgcatgttcagaattcccatcagaagctgagaagcctctaaagaagttgaatgtacagggaagggtatgttctcttgagtggaggttggtacctctcaaagaaagccttcctgactctggtgtcttcagtgttggggttcaggacacaccaccccaaaatatgactataggagaccaaaacatgccacacagcatattttgagctggttattttgggaaactgcagacacaggagccggtttgaaaagttgcccttttgtggcctggcggagtggctcacgcctgtaatcccagcactttgggaggccgaggcaggtggatcatgaggtcaggagatcgagaccatcctggctaacacggtgaaaccccacctttactaaaaatacaaaaaattagccgggtgtggtggcaggcgcctgtagtcccagctactcgggaggctgaggcaggagaatggcgtgaacctgggaggcagagcttgcagtgagctgagattgtgccactgcgttccagcctgggtgacagagcgagactccatctcaaaaaaaaaaaaaaaaaaaaagagagagaaaacttgcccttttgtaaagaaaatccacatctataagggaaatgtatattagtaaaactacctgtgtcagtaagagaactgctctgagtcaacgtttattacccaggagaattttcatctgcataacaagacaagctttattcaccatacatttcctccccttgccctcccataatttgcttttactacaccccagaagaccttagccaccatttctttctgtagctcaggatgccagataagctgcaatcacctggcccttcctcgaccctcatatttttgttggattctggtgtatgtatgtaattaaatatggtttttctcctgttaatctgtcttatgtcaatttaattaatagcctggccaaaggacccagaagggtgaagggaagccatttttccctcccctacaagagggtgtggcaaaagtcccacacctactcaattgtatcatgagggtcctgacactcaagttagaataatgtaaggagggtgtatttacaaggtactctaccagactcctctgatgcaccaattccgatcctttgggcctcacctgtcttgtggtccggccactgctgcagtgatcaactgccttttttgctggtgcagtccagcaaggtgtgtagccaggccttatgagcttgcaagagctaaacacaaccattattaaaaaataagtgatataaatttataattaaataaattacattaaaaaggaagataaacactcgaaactcatcactccctattttatgacattttactattatttttgctcttgagctatttatttatttatgttttgttttgttttgagacagagtctcactctgtcacccaggctggactgcagtggcacaatttcggctcactagaacctccacctcctgggttcaagcaatcctcctacctcagcctcccgagtagctgggattacaggcatgtgccaccatgctcagctaatttttgtatttttagtagagatggggtttcaccatgttggccaggctggtctcaaactcctaacctcaggtgatccgcccgtctcagtctcccaaagtgctgggattacaggcgtgagccaccatgcccagccgtgctcttgagctatttacatctattgaatcatcttttcaagttatcttcagagtcagtatgttggtagcttgaaatcagctatggtgaatatttataccatagaaatgtgaaattaagtaactcaccttaaagctgttggagctttaaattattctgagccttgagaagaatgtggccatctgactcgagtcacggggtatacagctgcaaattttgccttttttttctgtaaataattaagaccaaatggcaccagagataggcccctttagatcattgcccctactcatgtgttaataaagtaatcttcctctgaacgtagcaatctgtaaccaatcaaactgctgtaaaggcaaggcgtggtggctcgcacctgcaatcccagaactttgggaggctgaggtgggtggatcacttgagcccaggagtttgagaacagcctgggaacatggtgaaaccccgtctctacaaaaaaaaaaaaaaaattagctggatgtgctgccacaggcctgtagtccagctacttgggagggtgaggtgggaggatggcatgagcctggaaggcagaggttgcagtgagccaagatcacaccacggcactccatcctgggcaactgagtgagaccctgtttaaaaaagaaaaaaaatcgctgtaacatatgcagtggtctcatatgtaaaatgttgtgatcttgctaaaatttgtctgtttctacaagtaaaactgtaacttatgcactttggaatgccgaccccatttgttgtcagtgtcctcgggtgtctatcctcaagcattgcaatcaaataaactctatacttaatcatattttctgaatttcattatttaaggtagataggaataggagagccagttgtcgaacgtttaccgcactacactggtgcaatctgtcagcacctcccctcctacccggaagcacaacttttccgtcctgtcctgaggatccatactgagttctgggacaccatgcagtcatgcccagggctcaccacatgggggagttaattccttgtggagctaatatttgacaaataagaaacgagagctggtggattaattcttgcctcttccccgctccccaccgcagacggtcctacttacaacgcagctcagagcacagttctgttgcattgagctatcccctgcacttagcagcagcctgtccctcacacctcctaggatggctctccctcctcttcccattctcttattcctctgctctgagatcgaactccctttaacaatagcacattcaggctttgcgttctagggaagtcagggtaagacaggacctaatgtggaaagtgagtgtggttgggaagagcaagggattgtgtaggaacctgaagccagcaacacggaggctgtcacaacccctggcttgaagagacaagggcagggagcatttagcaaaaaccagatggggagaaagtcatcttaaaatgatctgaggccttccattgtggggcacagacaggaaggtaggaaaggaaatatccagtccacagcctgtcccctccctcaccctctcaccagggagcctcattcactggacataatttggagccagcggacagagatgggctggggtggggcaggaatgggagaagagtggctggaaggacaaatggaaattgtttatcacattgtcctcgagcaaaatctactaattagcattcccagttgccagtcacgcctttcactcgggagagaggctggtcagattatgcagtggcacccagggagacatcagctgtgcgaagaatgagaggggccaaaacaaactaagaaaaaacaaattctggaagaaacaaaggtaatttagagaacagaaaagaactcgaaaacaaacctattacctcaattcaacatggacagcatctggtgaataaaaggaacgctcaaataagaaagagttcttagaaattaaaaaaaaatgattagagaaatatgaaattcaacagagggactagaagctaaagcagaaaaagtcttccagttcctcaggcaaaaccacagaaaccgcagaccataaagatgagccatggaagtttaattcaagatattagcccagaacgagagaccaaaaaatactgaaggaataattctgggaaaaaaaaaagtgtttatagaagaaaatgccccagggctgagtatctacatcttgcagagagctagactttgtctccctttatcgacaagtgcttggacgctgccttcagggtctgggtgtaacctgggcgaagcagctccctccagccccgggcaattcctggagagggattaggagttcaccatcagcaacaagtagtttgggtaacagggaaagaggcttgggacctgaaaggggtgcatcacagcatccaccacatccaccccttgggcaccactagaatccagctgctttgaatagacgtttatcctctgtgggaacagctcgtccaggatggtggctgggcatttttattggagaaacatagaacagaaaggatattgacatacattgtaatccccatgactgcattcagccccgaggctgtagctgattctcattatctcctcttctattttactccatctttataccctcacctcttgcctctagtgcctctgctggcctaggtggcttatctgggagagtaacccagaccttcatccctgaggagagcaagccctggccacagtctttcacaggcgtggctgctgcatttgttcatttccatcaaaattgggcgggtgttgggaaccaagagatgctctggccgatcacgtgggggcctgacctattgttctgcaacagcagccctgcctcctcctgaggaatgtggataatttgcctgccagcaaggtgactctttttcttgtctgctggtcgcttggcaagaggaacccaaagtgataaggcagcagcaatagcttaaatgtagtaggactcacacggtttctcctggaagaagtgttacccctctaggaactgggatcttatagactagtgctgtctgatagaactttctatgatgatggaaatgttctatatctgatttgtccaacatggtagataataactatgtgtggccactgagcccttgaaatctggctagtgtgtcacggagagtgaattttaaggccaggcgtggtggctcatgcctgtaatctcagcattttgggaggccaaggtggggggattgcttgagcccaggagtttgagaccagcctgggcaacatagtgaaattctgtctctacaaaaaataaaaagaaaataagccaggcatggctgaggtgggaggattgcctgagcctggaggttaaggctgcagtgagctgtgatcataccactgcactacagcctgagtgacagagtgaaagcctgtctcaataaataaataaatcaacaaatatgtaaagtgaattttaaactttattttaattactttaaatttaaatagctacattgggatagtggctactgtgttggccagtgcagctctgtatcatcagaacctaaagctgcagagtacaatgcccaaactccccacctgggtcactggaggtgatggtgagtagggccacgccttaatatccatgccttggctctatcaataggggacatggcaccatgccatggtctttgattcagggcatatactacatcccagagaatgccaccctataccggaagggcatcatctccaagctggagccccagctgtgccttcagaaggctctggcatcactttctcaggcatcagcttgtgagtgctgcagagaggactactagacccatgaccaagtatccctcctctgctgtgaagtgggttgcttgatccgaggtggtggtgagtaagcggagctccatgttggtggatcaaatattataagatggattgtggtgctggccaacactctacaggcagggaagcagaatgtgtgttgcctccaagcaagatgaattgctcccccttccagagtgaagggatccagtgtcatcaactcgccaccaactctttcatcggtcactttgaaagattaggggtttgactttggtttctgtggctcgcaaattggccctttggctgtggcagtggctcagccttggcgagttggagctcttctgtctggcacatgcagagcctccacccctgccaccatggcctttccctttgtgagcccgttgtgccagcactgggacaaccgatggcagaggctagaacagacagcagctgaccgagccgttctctctccttggctgtgtcaagccttttctgggttgtttgctctctggcggatattaacatctgtgccaggatcttcactgggtgccaacttccatagacacagtcacatgtctcttcccctccgtgttctcaaccttcctccttccaggccctgacgagcccatcaaatcacacaagactgcccaggagccaatgtggagtctgatttcaggatacttctctttctacactgcctgaagccctgcccactgcgagagcttccccattaccgccgtctctcatgaccaccctgaatgaggcggccagagtacatctgcagccagtttttattttgtgcccacatttcaagctcactcacccctgcaccaagcttaacctttcccctcctctgtcaggtgatcacaagggactctcccatgtgcctctgagtgcgatctgagggaagggcgctggtgtgggggtgatggcacatgggagcgtgggtcacagctccatcaccaaatcgttcctctcctcatgttcctgcccctcgtttatgttgtgacttgaccctggttcttgctctggaatccaggagggaggtggggacacagcctagggcagggatgtgcatgttgtctggcaagataaaggctcaagtgatcccacagggagctctggagctaggatgtccctttggcatcatcctgaattgaggtgagaggactggcccttttccctccatattgtccagacattggctgcaagctgcctcccgagagagtcaccacaaccttggccagggtagtcaatgcccagagaagctctcagctgtgagctgtgagcaatggctctcccagcagctgggggtgtgagtgcctcgctccagaagggagatctaactctagaattcacccagcgctctgctctgttcagccgccaataatacagagaagattctacaggcctccagagagaaaaaagaggacttagaaaaaaataaaattagaaaacaacattttatttttaaaaaaattccttccttttgtaaatgtttgctaaaatcatcccttaatcagttaagggatcaattcaaagactactggttgaggtagtactaattctactgtgtcaaaaacaactcgctttactaaagtaagccttgtaggggtaggatttggggttgtcctgtacaactaactgctacctggagtcctctacttcccctcaaaggagaaaaaataagaacgagaaaaagagcagaggcggtacagaggaaggatcactctgaaatgagcagaggaacgcgtggaccatgcaagactgtggggctccccgtggatcgccccgaagtgctctgaataccaagcaattcttcaaagtcttatcacaagacagtgaccatcatgtatagacagcttacatttgttgagtaggaaagtgtcccagggcctgctccctgctctgccacacgtggaggcccagggctggggctgtgttctgtgggagaaatccgcggggtcgagctggtggggagacgcctggtagggcgaggcgtttggtttactcttgtgactttggtcaacgctctgcaggtttggccggctcttctctagcgccctctgctggaaaacgtcaggaactctgtattgaaaatacgtaatgaatatttttcagtttttgggcttttctagtggggaattccaggtgctctctccaaagcccagagcctccccaagaggagcagcttttacgagacattctagaaggcagagaggagaattctgcttcagtctggtctgagaggggcctgggagcctctctggtgggtaagaacccaactctggcactgtcccccgctgagactgtgagctgcgagggaggccggggtgcaggcctgcctccagcgtgattagctgtctcaggggacaaattcatccccaagtacaccgtgaggggtttctgcctctcttcccatcttgctttgagggtggtaacaagatttattcttgaaattgaaggggctaagtattttataccaaacctataatttgttttattattttttgagacagggtctcactctgttgcctaggctggagtgcagcactcactgcatgctctatcgtggcctcgacctcccaggctctggtgattcttccatctcagactcccaagtagctgggactgcaggcgcccaccactatgccccactaatttttgtatttttattttattttttgagacagagtctcactctgtcacccaggctggagtgcagcggtgcaatcttggctcactgcaacctccgcctcccgggttccagcgattctcctgcctcagcctcccaagtagctagaattacaggcacacaccaccatagccaaataatttttgtattttcagtagagctagggtttcaccatgttggccaggctggtctcaaactcctgatctcaggtgatccgaccgcctcagcctcccaaaatgctgggattacaggcatgagccacggcgcctggccatatttttgtagttttagtagagacgaggttttgccatgttggccaggtcttgaactcccggcctcaagtgatccttccatcttggcctcccaaagtgctgagattacagaaatgaaccaccgcgcccggcctagaatttatttttatatcggtcttcccaagtgacaagtgctgttctatagaacgctcacttgaaattatgcacagggaactttttgctcaaaacaaaagatccccatgttcaaatacgactcctatggaatgtgcttgcgtgcctcctctggagactgtaagcttcaggtggaagcttggaacttaggatttcattattctgtggacgcagggatcggtggatggataggaggacaaacaaatgacacattccttttttttctttttgctcattgtatttttttaaaaaacattttaagtctactgtacatacagaaatatgaacaaataataattgtatagcttgatgacgtttctcaaactcacctctgcacctggatccaggaagagaacatccccagacagtctctcacaccgtcccccatgaaggtggctactctcctgattctaacagcaaggattcctgtgaccagcttttgtcctttgcccagatagaactacgcggtgtgttctcgtcagtgtctggctttttcgctccctatcaggagtgtaagatttacccacatttttgtgtgcatggattataattatggcagtgcaatctcttatcataacaattagtttgtgttctcccagaagagaccctgagcaaggatcctagtgtaagcagtttattgggtgacgaagaaaaccctggcaaatgaggtgaattaggaagagagacaaggaaaggtaggtggccaataataggtgtgttatatagcaaattaccactgtgggcacctggagctcaatcccgccggtacctctgggagacggtgtggagatgcctcggagggatgcaggagctgtgtattcacatccaagctccatacagtcactggctgatgggcaaagactgtctgtgttaatgccctggaactcccagccagctgcagggagaggcacaggggctctggtgttcgcgaaagctcttggaggaagaacagcagtgaaggcagtgggaactcagggaagagggagagggaaaggaatctgggcagtcagaatctgctacagactccgtggatcagggttttacgtgacgcttctgtactcagcaaagaacattctggaccaggtacttgcttttcctgtgagaacatttgctgtgttcatccatcccacgtcctttcattctcttcccacttttccttttgcaaagctacactttgctcagatgcagacagccttagtgggtctgtcaaacgcagcctagggtgggtcttgacctaagctaggccagccaaaacctgtccttcggggcaggaaagggctgggactgccttctcctggggtggtgcctccatcagttctcgctgtctggtttcctgggattgcccagcttcttcttgtcacttgctagtgaaagttttcctcaaggttctgtgaactgccccatattctaataaattcctctttttgactgtctaagtccaggccctccaagcagcagatgccaaggtggaattagatttctaagggatttattggagaaattgtggagggcaccagaggaggctggcagacccttcagccaacatgcaggtctgaccctgtggaggagcgagggaaggaaggaaggaaagaaggaagggagggagggggggcgggaggaaggaaggaaggggaggagggggaagggagggagggaggaaggagggcaccagatgaggctggccgacccttcagccaacatgcaggtctgaccctgtggaggagcgagggaaggaatggagtgaggagggaggaaggaggaaggaaggggaaggagaggacaggcagggagggagggaagaagcagggagagagggagtgagggaggaaggaaggcaccagaggaggctggcagatccttcagccaacatgcaggtctgacccttgtggaggagtgagggaaggaaggaagggagggagggagggagggaggaagatttgataggaaaagtttttgcaatgcaattctcaaagagttttggcaagtccgagggcggtgggggtggtccttaagccaaaattagctgggtctcaaagaataaacctgccttaatatccctgctgcttttagtcattggctggaaacagtccatggaagtatagactttgggcctaaagtcaggggcagcacctggagcctttggtcaattatgctcgctgcagcaggaaacctgagaggcacagctgtcacgttgcctcagttaacaagacagcagccaaagctacaccagctgatacagttcctttacctctatggctgtttctttttaatatatatatataaatttaaatataaattgcctttctccttgatttatttggataattaatagtatatgacatctacttatcacactctgcatgccacattgaaccaattacactgttagagtttcattttgttatctgaaactctagccatatgttttgtttttaaaatgcaaatgccccttagtagtgttaagtcttagttgtttaccctttcgtaaaaccaatgttatccagctggctcaatcccactttccagctgttggaccttaggcaagtctgtgaacctctctgagcctcagttttctcatctgtaaatgagaccctgctcatggggtgacatagttttactctgtgtcctcaccccaaaatcatctcaaattgtaatccccacatgtcaggggagagacctggtcggaggtgattggatcatggggtcagtttcccccatgctgttcttgtgatagtaagtgcattctcacaagatctgatggtttaaaagtttaaaaatgtcccccttcgcatgctctctctgtctcctactgccatataagacgtaccttgcttcccttccccttctgccattattgtaagattactgaggcctccccagccatgcagaactgtgagtcaattaaacctcttttctttataaattacccagtcttgggtagttctttatagcagtttgaaaatggactaatagagaaaattggtatcaggatagtggggtactgctataaagataacctgaaaatgtgaaagcaacttgggaagtgggtaatgggcaaaggttggaacagtttgaggggctcagaagaagacaggaagatgttggaagtttggaaattcctatagatttgttgaatggttttgaccaaaatgctgatagtgatatggacaataaaatccgggctgaaatggtctcagatggagatgaggacttactgggaactggagcaaaggtcactcttgctatgctttagcaaagagactggcagcattttgcacctgccctagagatctgtggaactttgacttgagagagaagagtgagggtatctggcagaagaaatttcagaaacttttctgaaagcatacagtcatatgcattcacaaagagatgatttgaaattgtaacttatgtttaaatgggaagcagagcataaaagtttgggaaatttgcagcctgaccatgtggtagtaaagaaaaacccattttctagggagaaattcaaatgcctgcagaaatttgcataagtaatcaggagccaaatgttaatcaccaagacaatgggaaaaatatctccagggcatttcagagagtatcaaggcagcccctcccatcacaagcccagaggcctaggagggaagaatggtttcatgggctgggcttagggcccctgctgctctatgtagccttgggacatggcaccctgtgtcccagctgctccagctccagccacggctaaaaggggccaaggtacagctcagaccattgcttcagagggtgcaagtccaaagcattggcagcttgcacatcgtgttgggcctacaggtgtgcagaagacaagagttgaggattgggaacttccacctagatttcagaggatgtagggaaacacatggatatccaggcagaagtctgctgcaggggcagagcccacatagaaaacctctggtagggcagtgcagaggggaaatgtggggttggagccccaacacagagtccccacgggggcactgcctagtggagctgtgagaagaggtccaccatcctccagaaaccagaatggtagatccactgacagcttggaccatgcacctggaaaagccacaggcactcaatgccagctcgtgaaagcagccatgggggctgaacctgcagagccacaggggtggagctgcccaaggctgtgggagcccacccctcatatcagcacaacctggatttgagacattaattcaaaggacattattttggagctttaagatttaatgactggcctgctggatttctgacttgcatggggattgtagccccttggttttagccaagctctcccctttggaacaggagcatttacccaatgcctgtaccctcattgtatcttggaagtaactattttgttttcagttttacgggcttatgggcagaagggacttgccttgtctcagatgagactttggacttggacttttcagttaatgctggaatgagttaagactttgggggactgtgggaaggcatgactggtttcacaatgtgaaaaggacatgacatttgggaggggctagggacagaatgatattatttggctctgtgtccccacccaaatctcatctcaaattgtaatccccatgtgtccggggagggactggtgggaggtgattggatcatggaggtggatttcccccatgctgttcttgtgatagtgagtgcattctcatgagatcagatggtttaaagagtgtggcagttccaccttcatgttctctctctctcctgccaccatgtaagatgtgccttgcttccccatctcctttcaccatgattgtaagtttcctgaggcctccccagccatgtgtaactgtgagttaattaaacctcttttctttataaattacccagtcttaggcagttctttatagcagtgtgaaaattttctttcttctttctgtctttcttgtctcactctgttacctaggctggagtacaatggtacaatcttggctcactgcagcctcaacctcccaggcttaggggatcctcccacctcagcctcccaactagctgggactacaggcacataccaccacatctggctaattttttgtattttttgcagagatggggttttgccgttttgtccaggctggttttgaactcctgggctcaagcaatcagcccacctcagcctctcaaagtgctgggattacaagcatgaggcaccacacccagtccccagttctttgttttctcttctgttttctttccttcccatctctgcatcctatagcctgctccttaccagaattgctttcctcctgacactgagatttattaaagcatgggaatttgttgggattcaaagagaaaggaaaatgggaaaggatattttagtagatgagacactgttctattcacaaagagtttactgaggcaagggcctactacaaaaagcattttacaggttatctcattatgaacaaatgttgagtactgttattagataagccagttctcaggctgggtaggggtctgcagagaagaacttgaaactagtccactggagagcagtggtggagtggagagtggacagagccttagaaaatgtcctgtatgtgggcgctcagtcaatatgtggtgaccaagaagaggcaggagaagggtaaagaaaacagagtcagaggactctgaaagtgaactgctgagtcacagcgctgtctgcttcttggatggcgtttatcccacctggagacagaggctccatattaagtggtgaactgctgagtcacagcgctgtctgcttcttagatggcgtttatcccacctggagacacaggctccatattaagtggtgaactgttgagtcacagtgctgtctgcttcctggatggcgtttatcccacctgaagacacaggcttcatattaagtggaacaccacccattgcaccttcctagcctcctctcagtgcctgctccactgagccttgagcgcccactttccactttgcacttgtcattctttgaagttaatggactttggctaagcctgcctgtctccctctctgagaaatccaaatgccccccaaaacattttcaaaagctggaacatttgcttttcaaaagttgtcacaagggagtccttttaagaacctctgggcggccaggtgcgatggttcacacctgtaattccagcacttcgggaggccaaggcgggtggatcatttgaggtcaggagttagagaccagcctggccgaggtggtgaaacaccatctctactaaaaatacaaaaaattagccaggcgtggtggcacgtgcctgtagtcccagctacttgggaggctgaggcaggagaatcacttgaacccagtaggcggaggttctagtgagccaagatggcaccactgcactccagcctgggtgacagtgaaactctgtcaaacacacatacacatacacacacgcacgcatgcacgcacaaacaaaaaaaccctgagctattaaaagggttggatttgcaagaattttgcttacagagaaaaattgcaggaagctaggttgtatacaggaaggtctacctaactaatctgtggaagaagtagaagtggtatttcattgctgatttgtttttctatggcagtgagagtggctttacctggagctacctgtcctcttctgtctagtccctcttgtggctagtgaccagcatttacaagaaagctcacctggattgggagccaaagagccacgaggagctggaagcaggttgtaggaaacacagcagggtcagcagtctgcatcccatgggtgtgcctgcctcagcactggaggaatttcatgaaagtctcagaggacctccctgtgcacacccagcaggttgtaaatgccagagaattagggccccagctccctgctcctcagatgggctcattctggggataatgtcccatgctgcttcccagaacatccccccaggactgtgcccactggtccacagtgaggtggcttcataaccataccttttgttggccaagttctcgcctcggtctcacttcttcacccacctcactgtgtatcccgcctccccctgcatattctctacacgcccaaataaaccatttgcacccaaatccttgtagctagagaacacaaaccaagacacacgctaacacagtcatggggacctgcgtgaagattcagttccgggtctgacacgctgggacgtgacaggcgcaggaaggcagtgtggtgcagtggggagcaccaggcactgcaggagagccatgccatgatcccagctttcctgctcttgagtggtgtggccccgactatgtcctttacaatcccctgctgggatctgagctcattgaccatagacatataatgatgacaaaggccatgctggggctggctggacacctttgctggtgtccatcgccatgtcttactgagacaggaataggagaggaggcctaggataggcagagtctgggcaggcatgaaaaactgctgaagagtttgagcagggggaggggcgattggatccgaatattgaaaaaatatcatggacaatggagtagatgggtagacgggccagcaggaagaggggagatgcgctgggagacaccacaccgcccatcaaggaggcctcacggcgcttagacaaggaagtcttgggtagtgagggagaacaatgggtaggtccaagacaccccgaagcagtcaaatcaacgaaagttcacgatgacttgaacctgggggtgggcagagggagatttctataaaagatgacatcaagtttctgtgctacaacacataaagaccattagaagaaatcaggcttggagaagatgatcgtgaattccattttgtcattttgaatttgagatgcctttaaaacattccaatggagaatcaaatgcactgctggttctacagatgtacagagcaaaggaggggccagagtagacacacattttgcatttgttactgtaggatggtaacttgagctgaagatggggaggagactccccaagtaggtctctggactaccagcagcacagcattacctggaaagttgtttgaggtgcagaatctctggccccatcctgtccaagacctactgagtcagaaactctggggatgaggcctgcagaccctgttaacacacccttcagggcatttgcatgcacaggaaagcttgaaaatcactgactgcaggcagcgagtctcaaactttgcttcacactagaattacctggggagcttctaaaatcccaatgacaaaatcagctgggtgtggtggcacatgcctatagtcccagcaacttggcaggctgaattgcagaggatctcatgagctcgaggctgcagtgagccatgatcacaccactgtactccagcctgggtgacagagcaagactgtgtctataaataaattaacataaaaataaaaataaagccaggcacggtggctcatgcctgtaatctcagcactttgggaggctgaggcaggcagaccacctgaggtcaggagttcaaggccagcctggccaacctggtgaaaccccgtctttacaaaaatacaaaaattagccgggcatgatagcgggtgcctgtaatcccagctactcaggaggctgaggtgggggaatcatttgaacccaggaggtggaggttgcagtgagccgagattgcaccactgcactccaggctgggtgacagagcgagactcggtctcaaaaataaatgaataaaacaaactaaaacaaaataaaattaaattaacaaattcccagtgcccatccagtaccattacgtcaaaatctctggggagggcaaccaactcatccccatttgtccaggtctgcctgggactttcctagttttagcactgaaagtccctcatctcaggacacccctcagacctggatattctggatccagccatcagaagcttttaaaactccccagcgggttccacctgtgcagtcccgtttgagaaactgttcctggagggttagttcatgctgcctgaatgtaagagttgactggggagctttaaaaagatattgaatttccccggatcccttcttcagagattctgacttgcctggcctggagcggggcccaagtataagtagatgataacagccctcaggtgattctcattacagacagggttagaccctcggacatagggaaagagcatcaagtggaaagaaaagtacccaccagattatggccatgaagagaaggaggagacttctaaagggtggagaggtggccggagaagcaagaggaaagcaggggccttggccctcggcagccgaggggagatactgctggaaagtcataatcaaggcttgcaaaatgtgcattggattgagctgtaccaacatagggcgcagaagataggagggctgcagtgtgaagggaaggcaagcaaaccaagagccagaggctgctctttctgaaagccacatggcgaggagggaagagggatgaggctgtccctggaggagtcgtcttatgtccactttttttttttcctgcttcttttccttttctctttgcttgtttatttttcgacggccacgcatttcttgtattttcaggggaagaaaaagtgttaaaaatgactctcttgataagctccaaacatttaaaagttggtgaatctaccaaggcaacttcattatttctgttgaagagcagagagcagaggaataattccaactgattggcacacacgactggtcgtaagtcacatgttactcagagccagagccaggagtgaaatctagcatcctggagccacacggctctcctgcacgcctcgcctcctccccaaaggagctctgaggtttggactgcaggaggtggccactgctgatgtcatgcttatttcggaaaccaacggtggcctatcttagtgccagaggggaaggctctgggttcatttggctgggttgcataggcattattccattagcaatcacatcactggggcccagagagttaggtgcagctgatgaagaatgagttgtccttaagatctgattgctgatcatttgacagtgtgccgtgcttactccattaaacctctttttatcccccacatgttctttgtttgctagagaatatgggaagctatgagttcactgataatttcttttcttttctcttcttttcttttctttttctttgagacggagtcttgctctgtcgccaagctggagtgcagtggtgtgatcttggctcactgcaacctctgcctcctgggttcaagtgattctcccgcctcagcctcctgagtagctgggactacaggtgtgcaccaccatgcccagctaatttttgtatttttagtagagacagggtttcaccatgtttgccaggatggtcttgatctcttgacctcgtgatccgaccacctcggcctcccaaagtgctgggattacaggcgtgagccaccgcgcccggcctctttttcttagaagagcaaatgcagggttctccaagctgccctgtttgtctcagaatagattattaagctggttaggggttttacctaaatgcatgcaactgtacaacagttacccacagggactttaagtgtggttttctcgttttccttttctctcctcttctgtctccccatctttccttattttcctttcctttatttataaagaggtcatgacaaaagaggacaattgaggctaaaaggggaggataagaatgattaacctttgaagggctttgcaagctatgtatatagcagctaagtgagccacccggttctgcaaccctctggaatggcttttcaaacacacgttgatagttccctgactacctgtattcaccaatgtccctgaagcagtccatgctaatgataaatcgctgtttctcatgaacctgttgtctgtcatctagggacattttcgtgttaaatatttatttgcatatttaaaaaaccgcataagagcccattaattaccatggcgctcctgaaggatgatgcagggatgcttcatcaacggggctgttaaccctgtccacaaacaaatacgtacccatcagatttacctgtttaacttaaactataattactgggcaatcagacggctgacaagtgtaggtactaattatccaaatgagactccggctgcccagaggtacctagttatgtttagctccttaactgttacttcgtttcatattcacaatcaacgcaagtaacttgtgtccaatgaactggtttatcaagtgcttttcttactcttattgtaaatattgagaagtgctactttcacacgtgaagcaacacttcaatatacatggattttagaatgaagtctaaacgatctactggatttcctggaagaaaatacagcgagtgcttcacttagagatggcgaggccagcagatggcggtgtggaccagaaaataaaaatctccccttcgcagcgatcgggcttttggggtaagacaggccaggtttacttactaaccttgaagagcttttgaatttaaaggcctttcagttgtccatgcagaaggacttctgataagggaatcaagagagccacgtcgtatgctgggttcttaggtttagaaagagccgcccagcggagcagcgtggtcgtcctgcattgcgcacggggtgagagactgcagtcaccccgatggcctctgaattcctaaactttggacttcgatggctcatgaggactcaaccagctcattctagtttctagttctccccctcgctgacaacctcgctgtttttttgctatactccagagacttatgggaactttattgtaacccagtggggggaaaaatcttcaatttaaaggcagtttacattaatttttttatgttcatcttgaaatcttggtttctagatggtttaaattaaaatgagggtcatatgatttttaaaaacacattcatctttgactccctgtccttggcaaaatggctacttagatgtaagtaaaaggccaggcttggtggctcatgcctgtaatcccagcactttgggaggctgacacgggcggatcacctgaggtcaggagttagagaccagcctggccaacatcgcgagaccacatctctacaaaaatacaaaaattagctgggcgtggtggcgcatgcctgtaatcccgggtactcaggaggctgaggcaggagaatcacttgaacccaggaggcagaggttgcagtgagctaagatggtgccactgcactccagactgcgcgacagagcaagactccatcttaaaaaaaaaaaaaaaaaaaaaaaagagagagatgtaagtaaaagactattgagtcctttcaggaaatgtcataagaatcccattttaacagccattctggtagaaaggcataaacatataatggaaataaaagtgaaatgataagttggacatatcatatcatccagactatcaatgttaattattgtcccttagcttcaattcactttaactgggaataatatatatgaaaatacaaagtacaaattgtctcctctcttcttcctctcttaggtccattttctgtttctttctcccattaacccactgaaaacaagtagtatttaacccagggtactataaatgttacagttttcagatactgttgttaaacttgtttagctcataatcttgagtaaatgatagagcttgcttttctacagactgtctccgcccctggattagtcagattctccagattgaaaaaaaaaaaaaaacaaacagaataggatgcatgtatacagagagatttattttaaggaattggcttaacatcttcagggtaggtcaccaagctggagacccagggaagagtcaaagactgtctgctggctgaatccttcctggttggagaaccagtctttttttcttaagtcctttaactgattggataaagcccacccacattttggagggtaatctttgttactcaaaggccactgatctaaatgttaattgagtttaaaaacactttcacagaaatgtctagaatagtgtttaaccaaatacctaggtaccacggcccagccaaattgacacataaaatcaaccatcacaactcctaacttttctcttgaaaacatttcctggatgcacagatagagcttgggatgggcagaccctttccatattctctcacttgcaggcaagaaatgttaacagcacaggacactgggctgggaggtggggacccgagcattggtcctctgctgctgacactagtgtggcattgggggacaaggcctccaggcagtggtttcctcctgccttggtgtgagatctggagagagctggacattctcctacacagggccatgacccactgaatgtcatgatgataggacagggatgacacaggttattagttggtccagaaggttccaactaagtcagctccaggaagacagggggagatgggagtgggggctttggggattgaggtagaactcctcattgtgggttgggagctgctatagtttggatgcttgttccccccaaacctcatgttgacatttgatccaatgttggaggtggagcttagtgggaggcatttgggtcatggcagcagatccctcatgaattaatgtcctatctggaaccaagtgagtgagttctcactctattagttcccatgagagctggttgttagaaagagcctggcacctcctcctctgtctattacttcctctctgcctgtgatctctgcatactgactccctttcaccttttaacatgagtggaagcagcttggggccctcaccagaagcagatgttggctccatgcttcttgcacagcctgcagaaccatgtgccaaataaatctcttttctttataaattactcagcctgcctcaggtattcctttaaagcaatacaaatgaactaaggagcaagggccagagtctgaaccagaatttgggttaggttctgtccttttttttttttctttttttttttttagatagggtctcactctatcacccagactggagtgcagtggcacgatctcaactcagtgcaacaccttcccaccaggttcaagcaattctcccaccgcagccttccaagtatctgggaccacaggcaccacacccagttaatttttttattttttggtacagataaagtttcaccatgttgtccaggctggtctcgaactcctgacctcaagtgattcacctatcttggcctcacaaagtgctgggattacaggcgtgagccaccacacctgacctatcctatcttttaaaggacaaagattgctatgggttgaggctctggtaaattgcttgcaaaaatggttgcaattattcctttccctgtatccctgcctgtttcaatgtaactttgctgctcctcccattgaaaggtagaatctacttccccacccttgaatctgcctgatcttgtgacttgctgtggtcaagagaatgtggaggaagcaatggtatgctgagcctaggtctcaagcggtcatgcatgcctcttctatccctcttaaaaccctatacaaccatcatgtgaataagcttggggtggccttctggagaacaagggacatgtggcccaggtacccctgttgccctggtcaccagcgccatccagctgatggtcaactgagtgcagatgactgagcaagtctagctgagaccctgggaactacccagttgagccaaattgccagtctggagaacagtaggttaaataaatggttattttttttaagccacaagctaagtgtgatttgttgagcagcaaaaccagaaaaaggctgaactacagttctagtgggagatttcttcatctacagccttgctactggaaatagctccagtgaatggataggcaggctgccccataccactagctacagctgaaatttaattggcacaattatattcatatgcaaatgagataatgaaaatatttttcttgcccttaatagcatctttaattatctgggagctctcaggatcaaagaatgtgcaacataaggccacaattctgtttttgtggtctagtgatccttacatcattgcatcctcttgggaaatgcactcttgcttggaaatttccagtagacaactccttgttaacaacccttgttagaagccctgtcttaagcttcttaaatgaatctaattctcaacccacccccaagcccaaaacattcagttctgctttaggtcccagaccacaccctatgggaggtgggtataataaactgtcttaataacctaacttctgtcttaagttacccgtcagatcttggccctaacgccccttcagtactagttagactaacaaaagtccctgtgtcaggggtcctcaatccctggtatcagggttactggtcagtggcctgttaggaaccaggctgcatagcaggaggtgagtggcaggagagcaaggtcagcttcatctgtatttacagccactcccccggctcacattaccacctgcgctccacctcccatcagatcagcagtggcattagattctcataagaacgggaactttactgtgaactgcgcatgccagggatgtaggtcgtgctccttgtgagaatctaatgcctgatgatccgtcactgtttcccatcacccacagatgggaccctctagttgcaggaaaacaagttcagggctcccactgattctacattatggtgagttgtataattatttcattacatattacaatgtcataatagaaataaagtgcacaataaatttaatgcccttgaatcatcctgaaaccattcccctcccacctggttggtggaaaaaattatctcctatgaaactggtccctggtgccaaaaaggttggggaccactgctctaagtgctacattcaaggcacctgtgttttccccagcacaggtctcctgtctcactgtcaactcagccatgagactgggcctacattccagtttcatattcaagtcctactgggtctagagtccagtgctgtccacttcctaactgcctggagtcctgacaatgaactccaccctccaggtggcatcctactctcccttccctccttcttcaggaattaatgttctggacattatatcacttcaccacactgaggtctgtgatgcacaaagtggagaacagctcattcaaatcactcaataaggctctcaaagctcagggcactttatttcctcccagtaaataaaaagtggatggtggtttgggccaacaggataacacgccactttctggtatttccattggaacggttttgtaatacacggaaaactgttcacatgagattatctgagttttatgatggtcctatgagatacataggatataggacagttatcaatattctccttttacaggtggggaaactgaggattgagatcacatgacttataaatggtggatctgggaactgaactcagctctcctgattccaaaccctgtctttcttggagtgagagaagaatgcgaactcctggcagagagtccatagtcccaaacactcattttttccccttcaaacccagctgctgagatggcctggtgagggaggggacacattagagcactgttacctctgaatcaaacaagccttaaaagaaagcagcactgttagccgggcgtggtggcatgtgcctgtagtcccagctacttaggaggctgaggcaggagaatggcgtgaacccgggaggcggagcttgcagtgagccgagatcgcgccactgcactccagcctgggtgacagagcgagactccgtctcaaaacaaaaacaaaaaaaaacaaaaacaaaaacttaccactgttgacgaaaatgtatcgcaataaatgaaaaaccatggctgatgctgctacaagtgtaagaagcgataaaagagagtccttctgctggaggagcttatgctgcagctggggagggaaacatcggctcattggaaagagccatgtaactaggtcaggagtatgtgggtcttcaccccagttgcaggttgttatcatatattaggggaggagagggaagggtgaacttgtcggggatgtttcctggtggagctgaggcttcagaagactttggggacatgtgtatgacaacttccatttcacataaaattttacatactaaagaaatgatttggaaaaacaaccaaatctcatttctattttatgacggacagcatcattcccctttcctctaccattttctggaatttgctttcatatgctttaattgggcatttttgctgtatctatctaaattcatgttcagacatagtactttttcagcttccccccgcccccattccaactaccaaaagaaaccatcatccataaatatttgggtcattttatgaagttagcagcaaggtctggagcatgaggaaccctcagacccccagatttttgatgggaaactacagtgctccagagaggttgggctgactgggtggggccagcccacatcctattcctcctggtctctaagtgacacccctgcacacaggcccagggtgctgttctctacctggccatggcactctggccactgactttgtccttggctgtcactttattattacagttacagacctcaaaagattcaacagcacataattaaaagcatactctatcaatatgaatgttgcaatttagcaagattttagccttctgctttcagacatttctccaacatgtgtttgaaccaggaataattcaccttcacctttgtagctgaataattcaactacaaaaatgttcttgtactctctgatcttgagatggaatgtgggaggcctctggggcaaacttagccaagcttggactcacctgtttgaaaatgcctggacttcctcctttcccttgaactgggctgctcccctggagatgtcagaagggggagccacaggacgggtccccagctcagtcccgctggctgcagtcagctcagacctttcttccctctctccccaccctctccacgtcctgttcttttacctacaaatgactcagtgcagcaggcctgcctacagtaggcagttattacgtggcagacatgattacaggcgtggatactttccctgataacccctcagagcctgccggccaccccttgtcgcccacagccctccagctaggacagctggatgctctccagactcagatctctgatgctgcacacgtgaagcttggagtgggcccagggagagggagatgggaggcatggttgctgtgtgtttatagggagattgtaagactttctctcacctccaaaagagctccccttggagaacatttctgtgtgccattgtcccatctgattttcaagtcgtgtttacaacattgtttgttgtatttgttcatctgttttcttttcttttctttttttttgagacggagtctcgccctgtcgcccaggctggagtgcagtggcacaatctcggctcactgcaagctccgcctcccgggtccacgccattctcccgcctcagcctcccgagtagctgggactacaggcgcccgccaccacacccggctaattttttgtatttttagtagagacggggtttcaccattcacaggatggtctcgatctcctgaccttgagatccgcctgcctcggcctcccaaagtgctgggattacaggcgtgagccaccgtgcccggcctgttcatctgttttcacacaactaaagttgctcagttgttgtgctggaaaggacttccctgcccaaaatataccagcaagaccatcatgcaaccggagcaggctgtgccacagaccctggcatgcagaggtgttgtgtaaacacagaagggatctgggcaaatgcatgccttcatttataacagataaaaataaagaagtgtgccagacagtgaggcactgacgcttcacaggagggttccgagagctttcctccctgcctgaagttccttctcaacccaagtagccaccttgtcctcgtgtttgtagttcccctctcaatccaagcactatccttggcctgggggggtcatcatcaccaccagcaagggtcagcactgcagagtgacaatcctgtgccctccaaaggcagctcccttagaccaggttgacagaggcactgcattttccaacagtctaacaaagagaaggacttcttcacttccagcctcggggggatccaagactcagagtcatggagtccacagcacctgccctgtgtgtcccaggcccagtctctagggagagggctgggaactttatcagattatcaaattaaagcagtgacaaacataaaatgaggaaccactatggaaggggaggggtaggggaagagggggaggtaggaaaggagatggggagaggcagggaaaggagatggggagaggcagggaaaggaggaacagaagcagaaagggagaggaagaagaaaaggaggaagaatgaaagagaataggaagaaggaatcacttctatacatgcaggaaaaccactgccagggtttggcatattttgtagttggttaaaaaggtaacctcaaacatcctctacccacactggtagcttgtaccagcatgtgggctccccataaacaaggagggtgctttctggggagcttcttgaaagggaggttggggtgggagcttctgtttaatgacttggtgcctttggaaaattctccgatctttgtggaggttcacagtcatcccaccccagtaagctgcacagagagcagaaagggcatttagttcatgtttccacaaaagaaaaccgggagaaacagatgcatggtttagttagggtgactgatggtggataagtttggcatcaggtggccactctgggcactgggcactgggcaggttggtgggctctagtcaaggaatagggcagtggattctgtgcagattcccaggcgaggtgctggtgccctgcagtgtggcctgtttgcccataagctctgccaggcagggacatggtatttagctggtatcccttttttgtttaaatgtcccaaacaattttcaaatcattagtctctaaccatccagaaatactgtagcatttcacaccagaatgtacatttataattttttttgacagggtcttactctgtcacccaggctggagtgcaatggcacgacattggctcactgtgatctccacctcccgggttcaagtgattctcccacctcagcctcccaggtagttgggactacaggcaggcgctatcatgcccagctcatttttttttttaattttttggtagagacaaggtttcaccatgttggccaggctggtctcgaactcctgacctcaagtgatctgcctgcttcggcctcccaaagtgctgggactacacgcatgagccactgtgcccagcctataattgtttaaaatgtaaattaccttgactgtttgagcccctgctccctcgggggtgacattctttgatatgtggcagctgacagatatactcaaccacctccccagagctagaggaaggaatggcatggggtggaaaagccctcctcctccttcagggctgggccctctccctgctgtcccctgctctcccctgcaggtttgtcctctctcctccacactgctgctgtctatatatcacctggccagagtcacctggctttcttccttctttccagataggccactgtcttttgatacaggtgtcccaatcacctgtgtgccttgccatggacccgagcttgccattttcatggtaaaagttgatgtgtagatctaagggattatgtagaacctttgcaccatcagcgtcagaaaatagctcagatttacagaaatggatcggtaagccaaacatcttcttgtagaagctattgatagctttgttttttctattttgtacatatatagtcacccattggtatatgttggggattggccagggcacacacatatacccaaatctgcacaccttgagtcccacagtcagccctgctgtgttatacgaaaaatctgtgttatatgaaaacttgaccctccatatataagtgggtttcatatccctcgaatgctgtattttcaatccttgtttggttgaaaaaaaatctgcatgtaagtgtaactgtgtagttcaaagctgtgttattcaagggtcaatggatatatatatacttttctcctaattgaagaaaagtttatttttagtggctagtttctattttgtgatgtgatatcattttagtattgcttgctacttctttgaacatcattaaattgatttaaaatattttcttaatttgcttaactaagaagttggaatttaaaaaattttattaggagtgcctcgtgtgccttttgtaacatctagtttgtcatgaagccaattagctgtgttatagtcgaatgccagcaaaagaatgccaagctgtaaaaggagatcagaagcacattttgtgacccatttcttggtaggtggcattgcttgtttgaaattatacatcagtgttattacacatagccaagagggttcttagaatggattatcttactgttttttttttatctaagaattttatctcctgacacagatggatgcagggatgggagccggggtagcctgggagatggaacctggcggtccaggtgttgaagggtcgagatagacccaggatggccaatgacaggaaacccatctggctgtttaaatacggtgctaggcaactagcagtcacccaggcaaccgatggggctggggaagtccagcaagaggtgacagcgggtcctgatgacaggactgacttgccctcggaggcaggccatggaagcaggcactattcagagacgcaggcaggtggctggccttggggacgtctgtcagctgcagggatgggacgccaggccttgggaagagcaagagcaagacagcattccaggaccagggcaactggagcccgtggatgttgtcaagaaggaggtgggcactggggaaagagatgcaggagcgagtaggtggtccaggatgccaggtccggcaggattccaagagcaagcagaccccggggcagctgaagggtcaagaactgtggtgctgtgaagtggttctcaggacttcttaggtttctctctcaggaaggcctaccaaagggtcctaggtgtgaaaacagcggaccatggaagtgggaacaggacgggatattttcaagttgggagtccctggttagaagttattggattggaaactatggagggtttttcttggaagggattgttattccacagtctgtgtgtgtgcccggggtgtgtgtgcaagtgagagtgtgtgtacaggcatgtgagtatacacaggccaatgtgcagggttgtgagtgtgtagagttgtaagtgtgtccatatgtgagtgtgtacggagttgtgagcatgtgctggtgtgtgagtgtgtgcaggtatgtgattgtacatatacatgtgaaatactggctgggaagtccctcttaagtggccagaagatggaatgctgctaccctagcaataaccttgtgtgcgaggtctaagcgtgggctgtgtttataaggcagggattggagtaccactttcattttctcagaaggtgcccgcctatgtttaatttccacctatcagatgggcagactgataagtgagctttgacacaataactcccctcgccctgaacagagagcgccagaaaaggaagccagaagaggcttcaggttgcttttaccctgctggggcctctgcctgggcttctgtaacactaggagagtgagggtctccattcttcagaaaatgtggcctggactggggagagaaatagggtcatgaccgtcggagagacagggctgaagcaaagtcagaactttgagtgacctcagactcaagattgtcccttctgtggccttgcaagcagtgaaggccgcagagaagaccacagccactcactctccttctgttcggatttctcctgctggggcccatgcagcaggggggcaacagccttcaacagtccgggtgactttggaacaaacagctgggccgaacgtggaagtcagcgggtctttcccaatgaatggagccctcagtgtctctgttgcagaactgttctccttttgtctctcgctctttggctctctgttatataaacatctggagggctgagtatcattttagccatagtaaatagcttaaaggaagaatgcatcttatattcccccacaaagaggcaaaatggtgtgtgggccgcactaacataggaactggaaaaatatctgtgtggagtggatctgaagaagagtcgctcttggtctatgaatcgcttttctcttcctcttccaaacatctgtgaagcaatgaaataatatgtgtgaagtctgaagattcccttccggatcaatctgagagtcttttttttacatcagtggccataaagaaacaggttaaagcatcaaatgggaatgaaattgcttccatataatatttcagaccctgtttttttcccaatgcattaagcagcctgccaactaacaagcgactcatttccatatttggaatattttctgtggtggttatatgtttgtgtacttgtgggggttagggtatctaggaaaaagataaaaagaaaaacaaaagaacaaccaacacttttagctgatcagcattctgtccttaaggcaaaataagggttgcaattcttttgaacacctttgtctatctacagcctcacaactcaaaatgtggtgcaaggactggtgtcacccacaccgcatcgcccatgaccttattagaaaggcagagactggagcactccccctccacccccgaatctgaacctcattttaacaagacccccccaaaggattcctgcacattgaagtttgggaagccgtagtctaaaggccctgtctggatgggtgggctcattgtcaccgactgactttgcttaacactcacaggctggcttgagtctttacagcttgacattcctcctatgggaagaatattctggaccatctctttacttataaccatttagtatttaattcaatcattttgcacagttccttgtgtgaaagtatcaggaaaaatggatgttttgtcaacatatcctcactttgactgctatcaatccacaagtatttacttattcattgagacagggtcttgctctgcttcccaagctggggtgcagtggcaacatcatagctcactgcgtccttgaacttctgggctcaagtgatcctcctgcttcagcctcctgagtggctgggaccacaggtgcatgccaccatgctagataattttttttatttttagtagatgtaatgataattttaattattaaataataaaaataatgtattttttaatttttagggtctcacaatgttgctgaggctggtctcaaacttctgagctcaagtgatcctactgcttcggcctcctaaagtgctagggttacaggcatgaaccaccatgcccagctcacaagttgttggggacagagcaataaccaagaaaaagttccattttcagggaatgtaaatgccagaagatggagacagttgaacacacaagcaagcaagatttaacaaggcctcagataatgccatgaagaaaacaaaataaagctttgtgatatcctttggattcaagaaatcagaaacaagacacactatatgtggaagagttgcagttgttgactacggagatttttcacagctgtccactgagctacctggcagatggattaagagcaaccaggcccagaggcaaggaatggactaagagatatctgaattttcatctagtcttaagagtttttaaattaatagaaatcctagttgagatttgtattgcaagaagacccagggagaaagagagagacaaggagggaataaaaactcatttctttgggttggatctaaatgtccatcaaccttcagatggatgagggatgggtggagagggaggggaagctgagatgatttactcacaagaatgttttctacatcagtgctagttcttcaaagtgggttcttcacattccaggcccaggtggctccttccagaggtgcatccaggtggctccttccagatatgaaatggtagaagaattgtggagaaagggtggctgtgaagtcaagcaccatatttaaaatacgattctattgaatcccagctaactgtcctccagttggtgcaagaattcctagaaatcactgttcatagcagcagaagaaggagatattttttttctggaccacttataagaaatcagtggaaataataaacatatgtcctaacatatttcctatgttaggaaataagattttctgctctgggaacatctgttctgaatgatcatttctggttcactttttttaaaccaaaggcttgaatgaaagtgaaacaaaagcaagtatttatttgaaataaaagcaggaaaatgtctacaagaacattttgaataagaacttcctaaaataaggacaataatccttacatgaaggtcatcaatattccctcccccaactctgaacttcctgttggctctgagcatggccatcttcaattcttcttctttatgagcttggaaaactacttgttcttaccctctgcctttgtcacttagcttcttggatggggaaaaataaggaaaacgtgtcttttcaacttctgagtaagatcgttttgttttatttattattattattattttatgtatttatcgtagagacaaggtctcattcggtcacccaggctggagtgcagtggtgtgatcatggctgactgcagcctcaaactcctgagctcaagtgatccccctgcctcaaacttgagtctggctaatttttaattttttttttttttttttgtagagacagggtcttgctatgttgcccagactagtcttgaacacctggtctcaagcaattgtcttgccttggcctctcaaagtgttgggattacagggatgagccacggtgcctaaccaaggaccaggtcattttagttcagtgtggaagggcactgtgttagtccattctcacattgctataaagaactacctaagactgggtaacttataaagaaaagaggtttaattggctcatggttctgcaagctatacaggaagtatgactggggaggccccaggaaacttaaaaccatggcagaaggtaaagagaaaggaggtaagtcctacacgaccggagaaggaggaagagtgtgaagggagaggtgctacacacttttaaacaatcagatcttgtgagaactcactcactatcataagaacagcaaaggggaaatctgcccccatgatccaatcactaccactacctcctccaaaattggggactacaatttgacatgagatttgagtagggacacaaatccaaaccatatcattctgcccctggctcctcccgaatttcatgtccttctcacactgcaaaccaatcatgccttcccaacagtcccccaagtcttaactcattttagcattaactccaaagtccacagtccaaagtctcatatgacacaaggcaattctcttctgcctattagtcagtaaaataaaaaacaagttagttactttcaggatacaatgaagatacaggcattgggtaaatacacccattccaaaagggagaaatcagccaaaacaaaggggctacaggacccattcaagtctgaaacccatcagggcagtcattaaatcttaaagctccaaaataatctcctttgactccatatctcacatacagcccacaatgatgaaaggggtgggcttccatggccttggacatctctgcctctgtggctctgcagggtatactgcctcggatggtttctcaggctggcactgagggtctgcagctttcccaggcacatggtgcaagctgtcaatagacctaccattctggagtctggaggacgatgaacctgttttcacagctccactaggcagtgccccagagggaactctgtgtgggagctccaaccccatatttatcctctgcactgccctagtagactccatgagggctctgcccctacagcagaattctgcctggacatcaggcattttcatacaacctctgaaatctaggtggaggctcccaaacctcaactcttgctctctgcatacccacaggcttaacatcagatgaaagccacacaggcttatggcttgcaccctctgaagcagtggcctgaggcatatctggggcacttttagccacagctggaaatggagcagctgcaatgcagggagcagtgtcctgaggttgcacaggacagcagggccctgggccctgcccacaaaactattcttccctcctaggtttctggacctgtgatggaaggggctgccacgaaggtgtctgaaacaccttcaaggcattttctccattgtcttggctattaacttttggctcctctttacttatgtaaatttctgcatccagtttgaattccttcccagaaaatgggtttttcttttctatcacacggccagcctacaaatttttcaaacttttacactctgctttctatttatttatttacaacagatggtacagacattattttattttctcagagcagaggttaggcctaggccacagctgcccccatagctcccctcttgtctaaggatgcaaagttcattgctggggcacatccacccccagctggaggtgcaagcaaaggacactatataaggaggcaaaactctcccatactgtctgaaggatctccaacaagccatattctggaaagagctctgacagggaactttccgcaaggtccaactggagctgagacttgaggttaggttcaagtgtaagcttcctttccctcacagcctcggagccttcttggggcaggagccattgtgtgggatgggggtgttgctgtgattgagatcacttccaggccccccatggtcagtccctggatggcagacaggtgtcctggcccctggcctttcaccacaactcagatgtgggtaacaccctttcctgcagcttttgtcacggctgctatgcctgttgtctgtgcattaatgcctgtgcccttcttggcattcagaaattcctctgtgccacaggaagtatgggcaaggggctgattagtggcagagattacctggatctgtgtgttgttgtaggatgctctaatgtgtgcagttgggatctcctcaaatttctttcctgcccacctcagagagcttttttcttttgtaatgggacggtaaatgctaaagctggtgtagctgggagctaccatcttctcttcaatgttctgcttggcctcaatgtcttggatcttctgggtgcctgtgtggatggtctgcaccagcatcctggccatgaccctgtcaggaggaaaagattaaggagggccacagcctaacagtccttggggtctgggtggctcatgtgacacaggcagtcctggaggtggtggtgagctcaaggggacaatcattgttacctggtggtcaaggataaagtccaggaccacagaagtgaaaactcacatttcttacaacctgcatgactcaaattgacccccatctgctttccttttaaatataagttccagttttgaatcatttatttgctcacacatataagcatatgttgttagaagcagttaggtcacatcttgaatgctttgctgcttagaaatttcttctatcagatatcctaaatcatcccttttttatttatttatttttattctttttaaaaaaaattaatagagatggctggtctcgaactcctggactcaagtgatcctcccacctcagcttcccaaagtgctgggattacagatataagccaccatgcccagccctaattcatctctctcacgttcaaagttccacagatctctagggcaggggcacaatgcctccaacctctttgctaaagcatagcaaaagtgacctttactccagttcccaataaattcctcatctccatctgagaccacctcagcctggatttcattgtccatatcactgtcagcattttgatcacaataatttaacaagtctctaggaagttctaaactttcccttatcttcctgtcttcttctgagccctctaaacagttacagcctctgcccattacccagttccaaagtcacttccacgttttaggtatctttatagcaatgccccacttctcaataccagttttctgtattagtccattctcacattgctgtgaagaactaccttagactaggtaatttataaagaaaagaggtttaattggctcatggttctgcaggctgtacaggatgcatggctgtggaggcctcgggaaacttacaatcatggcagaaggtgaagaggaaggaggaacatcatacatggctggagcaggaggaagaaggtgagagggggaggtgctacacgcctttaaacaaccaggtctcatgaaaactcactatcacaagaacagcaagggggaaatccgcccccatgatctaatcacctcccagcaggcccctcctccaacgctggggattacagttcgacatgaagtttgtgcggggacacaaatccaaaccatatcaggcactcttggctttgaatattgacctgcctttatatggatggcgttatgacctacaggtatgtccttttgttttctcttgggatgaaaggaagatgctcaaatcagaaagtcatctatagtctattattcctcttagcaaacaattatgaagacagtaagtgcctcctaagatggtacagaaagagcacaaggggtaaaatgtgactctttagattggagtcacctgaccttgaaagtgactcccctctaagaagagaagctagtgcacagagcatcacagggcaattgaggagtccaggagaagtcaaggaaagcattctgcgctggacatcaggaagttgcatggagcaatgggcactttggccagaacttaaagaaccttctggccatgaggcatctagaaatgttcaaccataagtgcttgcagtgacagcatggcattgaccctcttggaggagggacgactggcagagggaagggcttggcaatgggaagtaatgggattagtgtggagtacagggataagaaagataggtgtggccggaatgctgtgggtcttgagtgactgtgaagagattgagtcgacaatgaggagctgttgaaagttttgactgggggcctgactgaatcatagaggaattgtgctaagttaatctggtggttttgtgcagataggttgcgaggaggaaggactgaatttagaaagaggaagtggatgtgagtgagatctggaggaattttccacaggaccgacgaatgaaggaggcaagagacaagtcaaatgtaatttccagccttcttaccgggagatggtcatgtcacttactgaaatcagacagttagggtggcacgtgtgtttggaaggtgaaggtagtgagagtgttttgacatgttgagcttgatgttctaaaagaatattttcaacgttataaaccatttaatgtatgtataaatataaatatttatatgaaaatgtatacatacatatatttacacatataaaacagttatgtttagaaattattgctgttattttacaggagtacttagtagaaagaatagcaatatgccacttaagagtatgaaaactctccttcaaattgttcattttttgtctctctttctgtttttctcgtaattaatgtggttaaattgatgcaagagattagagcctcgtggtcatctgaagttttctcttggtgcagttagagctttctttggtgcccaaccacactcaatgattcatgtttgtttggaatattattgaagttggaagcaaggggtggtgcctctgggccatgcaggaggtgccactgaggctgtcatttttgccaaagaaaagaaggcaaagctccagcaggccctagtcccagtgattcacttagagaagctctaggaggagcaagatggtattttctagtctctgcactggtgacatttggagcaagtcagttggagaaaaccaggtacccttctttctactgtctctgattatgtcacagggaaatcttgtagggatccatttgaatgtgcttttaatggattgggtttgaaacccattcctccttttgcactccttcgcacatgcggtgagaatggaaaactctcttgggaatcggaacacgtttaaggtgaagtaatgacgtacacttgactcttgcaaagtgactaatgccttaaatgacttactgctgccataatatatatgacatgaacccaaaggtcccatcaaagttgatgtgacctttaaataacaaaggatctcttagaaaatacatttaagaggccctgtcatctctcaaaaacataggatctataaagagggtcagatacatttaaaccatgttttgaagttgtaagcattttttatgttcttagcattggattaaagaatacaatcaggctgggcgcggtggctcatgcctgtaatcccagcactttgggaggccgagacgggcggatcatgaggtcaagagatcgagaccatcctgggtaacacggtgaaaccctgtctctactaaaaatacaaaaaattagccgggcgtgttggcgggcacctgtagtccctgctacttgggaggctgaggcaggagaatggtgtgaacctgggaggcggagcttgcagtgagccgagatctcaccactgcactccagcctgggggacagagagagactccgtctcaaaaaaaaaaaaaaaatacaatcagatgagacagtatctcaatgactcaaagtaggccttcgtggtaagagcctatggttcttggttaaaacccttaaaacttggttaaaacccttaaaactcattgaatcttttttgttcattctttgaacttcccttctatgttcttctattctctcctatgttctacttctctttctgtgttctattaccagaaatatacctgttgcttgctaattttatatgcctactcctaaaaccttaacaagtgataatgagaaaagaaaacatatttctttgagctctatccctgggcagggaactttctggaactctggtcctcccaacatttctcagcacctgagcgggaggcatctcagctctgctcaccaacgagatctcccagttaaagcatggtgcctgtcatcttctggctccacttggagatgtctgtggttgattattttgctgctgatgcagcagtgtgagtagggaggcaagctactgtcaccaaggagctctttcctgttagccctaaagggactagtattcctctttattggcactgcctctcactgctgctgaaactctccatgctgccacccaagttattcacatattgattcagcaaatagtcagaaccatggataacccactgtataccaggctctgcactaggcaccatggatacaatgactggctcctgctctgtccttatagagcttaaagttcaatgttggatgcacacacaaaattcacaatgcaaacagaggaggctcttcagacctaaggttgattggaaggatagatgagaggtcccactggcctggtaagctaagctgaggattttagttgtttttcaacaagcaacagaaaatctttgaaaagttttgttgttgttgtttgtttttttttgagatgaagtcttgctctgttgcccaggctggagtgcagtggcacaatctcagctcactgcaacctccacctcccagattcaagcaattctcctgcctcagcctcctgagtagctgggattataggcacacgccaccatgcccagctaatttttgtatttttagtagagattgggtttcaccatgttggccaggctagtctcaaactcctgacctcaagtgattctcccaccttggcctcccaaaatgctgggattacaggcgtgagccactgtgtccatccctgaaaagttttaatccaaagggcaagctggatcagtttgggatttgggagaatactctgactcagggtggaagagcggattgtaagaaggacaaatggaaatgggaagaagtgctgggaggctgctgtgagggcacaggagagacagtgtagcatggactgggtctggctgtggcagagatggggaagagcaccacatcccgccagtgtacagggcactactgcttcagggcagcctgcgctggccaagaaccacagccatgtttgctctgcaccaatccaaggagattctctctgttttcctattgtgacagtctgagatcttggtcccaaagaagcgttgatttacactatccattctaacatgtgcctgggaggtcagccccatcactcgtcagtcgtgttcagggatgttgcaatccagagatgaacacagcttgggcttcagctggctacctacagggggatggtaatgcctaggggattggctggttgtcagagaatggaaaataagctatgttttggaggcacaggaaaatttcagaatcaccatttggtaacatttccattatgtaacagtggacagttaaacagatacgtttcagcacactgtaagccgggtgggtggcccagagtttctatgtagaaaccgttgttgggttggaagcggctggtagtgaggtggggaccttgaagccacatgtctatttcacctcttagaaggctgagaaaatgtcagttgcttatatttttaaaaatggaggacttgatggaaatgggacaacgggacaaaatcgcacacacacacacacacacacaaacacacacacacacaccccttcctcatgcccaagggtcctgcctggagcatccgttttctacgataaaggttaagacagtgctgttgacaggtgctttaaaagcataaggaactaacttcctgggacagtcatgagaaaagcaagacattgctaaaaatatgcactcttgcccatttgggcgacggtctaagctcctgaaagcttagacagtagaagacaagttagtcatcgtcattcttttctgctgatttcaaccaaagtaagtacccgtttcctctgggatctagcccctcaacagctgttagcaaaaactaagccagcagggggcgcacaagcacagcaatgcttgcaatactgccattggccatgattctctcctgcctctgcaagatagaaattaggaagggaatgactgtggcgttaggctgtacatggacttaaagaggcatgtagaatcctaaaaagcaacatgaattcttttcactgttggaatggaaggcaatttatacagcatttcttaattgcattacatagcatctcttaattgaaatcaactaaagcttccttaactattatttttaaaatttagtagggcaattaaaaaaaagaaagttattatagctctcagccataacaactcaaatagcacatatttgggagaaatgataaagaaaaaactggaaatactggattcctttctcaaagctcaaaaagacaatgaaagggatgaaggcagaaatgacacttaagcaataaacacattcaagtaaacatcagtttctgaacacactccatttccattggcatctgagcatagatcttaattcaagaggtttaacctgcttcagagaaaatgaataaaagagaatgtagcacaatgcttgaagatcttcacatttatagactggtgaactctctcacccacacactgtaatttgggtggcgttccttcaaaactattaaggcatcttcattggagctggggtaattctaagcaacactaatggtgtgctcgatgttactgtaagtgagataaatgatagcaaacttgtatgagcaggtgcatctaataacagaggcgtagaagcataatacagcaagaaagaaatgttcaaatgcagaaaataagagctcacggaatcactatgagtgtgttagtgtgcattacggagtgaacgatgtgtgtgtctgaccactttgtccacatctctatctctggtgcacccaacttctttgaaaaatcagagtcaaaaccagtgagaggaagccctcatgtgttttcggtctccacttccagaaaacctcaagacatttttattggaggaataaagaaaaagcccttgaattacagagtactcaatgggtctaggagaatgagtctctaatactcactcacattcaagggaaatgacacatttatccatttcaggctcaactcttttagactgaagaaaatctaaaacaaatagatatggcttacagcattgcccatctaattagttttcttcctgcaccaaaggtggttgatgttatgtgttttctccatatcccgtgaaagaaagctctggagaacttagctcacttcctctagagagagttcttgaagaggagggaagagatggagctggcaaaatttgggcaaatattcttagtctttggcatagaaatatattgaggagtgaaaagaagcactaaaaaaaaaagacaccatcttttggcctctagtcctaagaattttaagattgtacttttttttttttttagatgaagtctctctctatagcccaggctggagtacagtggtgcgatctccactcactgcaaactctgcctcccagattgaagtgattctcctgcctcagcctcctgagcagctgggattacaggtgtgcaccaccacgccaggctaatttttgcatttttagtagagagagggttttgccatgttggccagactggtctcaaactcctggcttgaagtggtccatccgccttgtcctcctgaagtgctgggattacaggtgtgagccaccatgcctggccagattgtacctttaaatgactcaatagaaatgagtttcagtaagacatcattctgtgtgggaagccacttgcctagttctctcagaactccagaaccctggctgtaataactgggcaagtttcattcaaccgtggtggccacacacagtccctttgtgtaaggtttgtgaatttgaaatctttagaagataacaaaagaacttgtaaatgattggacccacacccagagagagagagacctgtatacattcttccatgcagaaaataaactggaaatctaacgcacaaaaatatttttgaaaccacattatcgaggtatgattgacttgtataaagctgtgtgtaattaatgtgtacaacttgatgagtttggggagaagcagacaccagtgaaatcatcactaccatcaaggccatagacatccatcccttcccaaagtttcttcccatctcctctattataataattattagtgtgtgtggtaagaacactttaaaagatttgacatagactattagttcctcctcagaaaggagttgatgggatttcagaggtggcgtggcttggagttgctcttctcttgatgtcccctgagggcctgcactgatcttggtcctcctgccagtgctcccagccccttatggacaactggctttctgcaccgtttgaaatgctaggcatggctgtcccacacggtgcttgctttctcgtgccttctaacctgggcactgagctttcatctgtgttcactggctggctccgtagcatttcctgccacacctccatggaggtatgggcattttgcattccataaaggggaaaagagcttcttcctgatcagagtttaagcttaaaatggttttcttcctcctgaaaccacaacgtttcctaacaacattaaaattcccctctgctcagccccctactggaccagctctgggctggagtgaggaaggcatccctgttggtgatttcatgcccactgttgtataggccagcacttccccaaagctggcctaagtactagcgtccggttaccctagcactggagagctttgggggatctgcctctgcccattctgacctatcccgtctaggaggagcctgacattttcatgtaaggagctcccagggcatcccacacaccaggaggctcaggaagccacaggtgaatgctatgcctgtgtcccctagggaggtaagtcagtggcctgcagagctctgggaaatctttctgcctggagagtagacaggcccaccagtgaggattcccgtggagtatttagccagcttggttctagttagatgtagaagacatggaaacaaaatgtggtgttggaacaaagcctttaactgtgggccccaggagtccctctgagatgtttggccacttttctgctgaaattgtgtttttattggtggaggatgcatttttaaagtatagaggcgtagcaagataaagaatagaaatgcccccgtctgtggaagcagagagagggcgggaagaagccattttgtcactcacacagcaggtaaatgccaccccaagccttaccctggcaaactcctgactccacctgtgactttattgtctgagacacgagcctctactctgctgtggctattgaaagttaattaaacttaaagaaaatgacaaattccatttctcagtcccactagccacatttaagggctcagagccacatgttactagtggctaccgcattggacagcacagataaaggccatctccatccgtgtaggaagtgctcctgcagggcgctggcctagagttacccctggtgggagatatggggcccatcaagccaggtaaccatcactggggtgaattttttctctggtgttgctggagcttattgaatagagtgtcaggatagaatcgctcgctggcttaagctgaattccatagacctccataaagaaacagaaaacctcttcagaggagaaagcatagttggaatagctcagtgctggcttaagctgttctgagatttttcagttgttcacttcataactctctgaaactccagccaatacttattatatggtcagagaaatgtgcagactcttcgaatctttattttgtcctttttcctctggaacagtggttggaggtctcaggtattggtatctgcttcaatgtctggaaagcttcttgaaagatgcctgctcttcaacagaggaagacgcaatgtttaccttcttcctaccatcttctgatgactgggggaagaagacgacttgagactggcctccagaattagggtgtttttatggggagagagttggaagcttggggtagggaaaaaggaataaggaaatccaaatgaggttgctctagggttgctattaaatcctctatcaaaaaaaggcctgggtactgaggtgagttttgcattatttcctgaaggtggagatgttggacttggatggattctgtggctcatgcacaggagaggcccagcctttggtaagttcaatttctgaggaaagatagcaggatcctgtgttgctggctggattgtgagacagcatgggtagcacttaaaaaaaaatcattcaaattcttagaaagaaaaagctggactccaaagtgaccacatgggcattgctctgaggagaggagatatggagaaactacttggcaaaatatattttataaaggttttgcacctcctgacatgttgcattagaaagccatgagtgatttacggccagaacttcctttggcttcagttgaaatgacctagctctcccaacttgcctcatggactctggtttagcctgccaattaatcaacacctgttcagtggtagtcacaacatgcctgtgtctacaagacagaaccaatgttccttagctcagcctgtttctcaatctgtagtttctaatatcctgaattccattttcttttttgagtcagggtctcactctgtcaccctggcgggagtgcagtggtgtgatcatagctcattgcagtctccaactcctgggatcaagggatcctcccacttcagcatcccaaggagctgggactataggcacatgccaccacactcggctaattttttttttttttttttttgagatggagtttcgctctgttgcccaggctggagtgcagtggcgggatctctgctcactgtaagctctgccccctcccgggttcatgccattctgcctcagcctcccgggaagctgggaccacaggcagctgccaccatgcctggctaatttttttgtatttttttttagtagagacggggtttcactgtgttcgccaggatggtctcagtctcctgacctcgtgatccgcctgcctcggcctcccaaagtgctggcattacaggtgtgagccactgcgcccggcccacactcggctaattttttaagtttttgtagagacagggtttcactatgacgcccaggctggtcttgaactcctgggatcaagcaattcttgagtgctgggattataggcacgagccaccatgcctgccctgaattccaatttctactagaactaaagaaagctagtctctgctccttctccttttcccactgtgtcctctggctcctaattcaagaacatggtgtctagcatatgagtatttgttaaatgagggagtgaattagaaaattacacttaaagtaggatgtcctaggttaaaggcaacagaatttagtgagagtgtgtggcggtcaaaaagttaggagttcttcctaataatgccttacatttggatagcactgtcttcgcaaagctctttcacacctataatttcatatgacttactgttaaaccttagataacattaatagcctttatgtgccttcatttttcacccatggcaaagaaaagatacccagtggaaatactgttatcttttcatcaagatgttgtaagagttataattgagtaattccctagaatatcattagaagtcaatctgaatataaaagggaatgccatcactttttgaagtttttaaagcctatttgttatggcctaagtgggaaaagctgcccaataaattagtacagtttaaataggaatgtcaagttacctctgactggagcttggtagaatgtgagaaatctgggcttgggcatcttgctgagatgatcctggaaggcaggccatgtaatggacttgcttgtttcacaatcaaccattttccatccctccaggcctccctccaagtgttttcccaggtgggcggcctgccaggctgtgtgcatgacagtctgacccctcaggttgtttataaggttcttcagggcagaggttccttgaggaccagtggtcaaggacttgggttccagccccagctctaccgctcaccagctgtgtgcctctccgaatcgaagcgtctttatgtctaaaatggaagccactacacttccctcccagaggaggcataagagacctatgcctgtgtaacgtgaccggtgcctggcatgtaatacattctcaataaatggtgactatgattatcttcttgtggaattttctttctcacttattgtcagtgcctagagaattgataggaacttggaaggtaataagtaatgcttaccaatttgagaggctgaatccttacatggtgttaatgatcttggttattttctcattgatctttgatccatttctacgtgtgggccaggacatgcggtatttactgttaaaagtaaggtggtagaagttcagtacacaatgaaaatgtgcagttttctttactaggtttggaatattcttggtaaaataaatactaagatttgttctattaaaacaaatctggctaacatcacaaagccaaaacaaagccaaccagaggtctggtgcaatgtttcaggcctgtaatcccaacacttcaggaagctgatgcgggaggattacttgagcccaggagttccagaccagcctgggcaacatagtaagacctccatctctacaaacaaacaaacagacagacagacaaacaaaaaatacaaaaattagccagacatggtggcatatgcctgaagtccagctacttgggaggctgaggtggaggatcacttgagcccaggaggttgaggctgcagtgagccaagactgagcccctgcactccagcctgggcaacagaacaagaccctgtctcaaaaacaaaacaaaacaaaaggcaaccaggatggaatgttgatttaaacctcaatttcattgacctgttttaatcaaataagcctactttaattgacgggaaaaaccaatagtaatgtcctgaatgcttcatctcagcacatacagacaatttttaaaatgcaactctcactctcgagagctggaagggaaacctttctcttgcagcattgtagggctaatgccttgcctcttggggaggacactaggatccaaagataggttttccctgacatcaccattttaatgggaaaatgtatataggagacgacattttggggggagggaggacaggcagctccagaagccctaggctgttctggaaggtgcaccccacattgtggaaggcaactctctcatcatgatgcttcttattttgcaacttttcaagaagttctccttttcatttcagtgctcccacccctggcaacagtaaccatttcgaatagtaaaatgtgcttaccatcctttcagttttgttaaggatggggatgagtgtccctttatttatccactgttgggggtacatgcccatgggcttccacaccctgtgctctggctctcttggatggctaccattcactcacattgccactgacgaggccaagcagaggaacggacacaggcttctcattgagccctcgtcttctgggtctgtgtttggttggtcctgcagccgaagcttcccacaccccgcatgaggtttactagacaaacaccttcagggacagtggaagctgatgggccactattctttgggggagtctgtggtttcatttaaagaggagctgtggatagatggctcgttatactgcattttggttgctgacgatgcaagaataaatgtttatggaatcatctttgtcccacagacacacctgaatcaatacaatcacttctccttctcctttctgttcatcatcaactgcatctctatcaacaggtttccatatctgtaaaatggggataataatagtacctgcctactaggatttttgtgaaagacaaatgtaattcacatgactggcatatagtacatgctcaataaatggtagttgctgtattgaaagatgtttgatactgaaatgcagttggaggaaataagcatcctgtctgagggaggttggttgccttttgttgcttactttataggtgatcttcttacatttaaattcccaccatttgacccacatttcctgaatagacccaggagacagcaagagcaatccacgccataataaaacccttttgctatctgatcagcatcagccaatctaatcattggctaaactatgtaccaaaaactgaattaaaaaaaaaaaagggagcttaaaataatgggctgcatttaacttgattgcttctgtagatttgaggcaatgtttaggagaatcaattttgccagactaaaaataaaaaaggaggaacacgcagcaatttatatagtgttctttgttatttgaatcaatagcactgtccccatgaagatctgaataatcacctttttgtgtggtgctggaacccctgatttatctctttgtgattctgttattggaccatcagtggaacagttttgtttcttaataatttcttgctctaactccctctctcccctctatttggaattctttctctatgccaaaaacttagcatttattccttgttgggagttggcatgtgctataaaaatatgtttttcaaattaacatgttcatgagaaatctcaagaagaggaaacagcatttttctgatgaggacattgacatctgtaccattcctagaagaacccacataacaaaaagggaggcggcaggaatggctgcagcatttgctgtcttggcgccttgtctaaggcacagttccaggtgtctgtgtgcacctcactgcttcacttagtcctcccactgctgtctgggatgtgtgctactctctgtattttacttctgtggaatctgaggctcagggagattcagtacttacttagggtcatatttattaaatatctgcctggaatttgatcccacttctgtttggccagaagacactttccaccatgttatgttgtctctcaatagagtctgatttccgtttgtctccttaataatattaattaaaccattttttcaagtgaaagcatctttgggaaaactattcatctctttctttttcagaaactaaagagccaggaggacttttctgttagagcttcttaccaaggattaggaagttttggaatttccaggctccacagttatttcagaagggattatagatgtgagcaatgtgcttttaactctgctgtcacatcctggggatttccagttggtcaggttggtgtgaggtggagaagtgttctcaagatttgggagctggatgccccaatgggacaaagacggaggagggtagagttccaaaatggcctccacgggccttcacgggaggacgtaggcttgtgtgtgttatactctgatgggaggtggcttcttttttttttttttttttttgagatgaagtctcgctctgtcgcccaggctggagtgcagtggtgtggtcttggctcactgcgacctctgcctctcaggttcacgccattctcctgcctcagcctcccgagtagctgggactacaggcgcccgacaccacgcccggctaatttttggtatttttagtagagacggggtttcaccgtgttagccaggatggtctcgatctcctgacctcgtgatccgccggcctcagcctcccaaagtgctgggattacaggcgtgagccaccgcgcccggccgggaggtggcttctttaaagaaaaggcaggccattaatacagtaaattgttggcttacaagaactatatttgttcttaatctggggtgtgtggacccccgccgagaggtccatggttggaattcagaagtcctgtgaacttaaatgagaagaaagttgccattattttctcaaacctgactgaaatttagcgtttcctttaattatgaatctacagtacctgtgattttgtcaccagtagagatcagatattttcacatcacattgcagttgttgcagaaatatcaaactattacttacgctcatcatcacctcaaaatgatgggggttattaaagtcaccgctagatcctgttatttattgcactaacaaagaagcacacatattactataatatacatttgttttagtaatattttgataactgtatttcaaggtattggttccctttgtaatactatgtgttttactttatgcatttaaaacatcattctgagactgttttcaaaaaaagaagttgagactcctgctttagaacaagtaacaaaaacacaggtttagaattataactcccttgatgcaatttgtttgatgatctatggacttccttagggtagctcaccttttcttcaaggtctgcctagatgcctattctgactagaatctgtaacagatttcaaagtctgtatttattaaaatttttattaaacatttttgtattgagatgattacataaaccacattttggaatttgcatatacctcacagaaaaaaaacttatatcaaagtcagttttctccatctccaagtgctctggggttgagggcagggtgaaggatggatttgaaaggccagagtgatactgaaacagaggctccctgcacttgtcttgaagtgcttgttacaagagtagacagccttctttagtgccctttaaaccgtaatagaaaatgccctcctggccccaaatactgtccccaccagcctgctgcagtgcctgagatctccactattaatcagattttgaattaaggtattttgatattaaagcccctgctcaaaaatatgatgcaaagagattcatttctcatattctcacacattagaaaatgcttcgttaatcctctctctcttcctgtgtaaacaccttccccactttacccacagaataatacagattcctgtggaagaggtcaactgattatattgtgaaaagcaggaaaaagaaaacgttacagcttcttggttcttttgctgaaaccttgattatatgggtcagtccgggcattgacttagaaacctgtgatggtggtggcggtggtgactttcatggatcgatctagttgtgaattttaatttctttcattgtgtgagtgtcactgtcactctgacaataaaaggtggatgttggtctgctttatagcatttcccatcccagcaaaaacccttgaactaaagtgtcatttccaggaagcctgtattataataaaaatatctttcccaagagtggcaaatacactggcaattgctgaccccttattgatagggtgaccgtatatgcctgtgtgtctggtagagtcccaggccaacctggtcttccatggtactatgtatggtgacattttcactcttgaaagtgtcttagttggaagatagattatatagtctccctgctttgggggaacagctgtcatgtaggcagggcttatcaggaaaggataggaacggaacagaagaaatggaaagtgatggaaatgtagttggtgtgtggaggaaagggccagccaagagttgactacaaccaagaatatccctaattagaagaaaggagtgaaaaccccaggtacccttggtggggagcagtatgggtgagagtgaatgtgccaaaaaaaaagaaggggccaaggactaatttccttttatctcagttccctgagtgcctgcaccatcttgatggctgaaatgtgtaaattcggattttaagacccgcctccatgccagggcctgatttggaaatcctcagctgtggctggtatttgaagtgactttttaaccatgggggatggtggaatcttcaattcaaagtttttgtttttgttttctcagtgccccctttcttccctgtcttcaatttccaatcctgaaatctacatttgcgtagctcacagaggcctagggttgcctcagtggtacttaatcgttaaaaagaagcccccagaccatgcatcaccaagaaaaaatgaaaaactgaagccatcagtggctcggtaatccacacttattgttactttgtattttgaacatcaccttttccacttacaaacagttatattattaaaaagatattttccgaagatagtaaccttggcagtagttgtcaaggctaatagtttgacatttcagatcacccacaactaatcaactgaacatggcaacacatttgaaaaacccattataggcggaaggccctgaagtaatatgtcaacgctcgctctaacagctgttatgtaaacgggctgatttttctctgctgaatggtcacatggttggagggagagtgcctttgaaggacacgtgcgtgtagctgggaaaggagattgtgttattgaatgccatatatttatggggggaaagtccctatcaccgatgataaaaacactcagtcatctctcacaaatgcttttagggatgtttttctcatctaaacataacactccctgaagggcgtggagagctgttccaccattattgccttcctattggggaaatgatctttagggctgagcatcccagagctgttgtccaagatttccctgaaagataagagaaaaataagccagcagctccggctttcaaaaactcccaagtccaggtgggcaaataaagaaggaaactaattttgtttctgcaatacctatagattttcaagttgtttaaagtatttgaagaacctagttcagaggatggttctttttaatctcttagccttggctagatttattactgagtgatctttgtggtttttgagaaacaaaacaagtgaaagaatcctcacaactgagtttactccaaaatgacacagaaaggttgaaaataaaaaattgggaaaagatattctgggtgaaaactaagccaaagaatatagctggcagctgtgttcatagccggcaaaatagaatttagagcaaaaaatgttaataccagaaaatatagacaagacaggctttttaaaaggaaatatctctaaatatgataaaacaatcataaacctaaaaaatttcaccttgaaagcaaagtctgaccaagaagccatggataaataaattacaagcataatggaagtcagtaacccaactctcaaaagcagagagattaaagcaaactaaatattgctcaggataacacaaattaataaccaaataagcctgagcaaagagatagctgtagacattgccatccaatagagaatacattttcttttttaagcatacatggaatagttaaaaaaattctcaataaatctcgaagaattaataaagacctgtcctcaaacctacacatgtgcccccataaacctgaaataaaactcagtaagaaaaaaaaatcaaatcaaacttaaagtcactgtacaaataataatcataataataatcctattctctgactaaaatgaacctcagttagaaatcaataacaaaaagacaacactccctccaactttttagaaactaaaaacactcatctcaaaattcacgggttaaagaagaaatgatagtgaaaattgcaaaaaatatttagacattaataacaaaagcaccacagatcaaaatacatgcagcagaactaaggttctacttagaagaaaatgcttacttttcaatgtagttattggaaaataaggaagacatcaatattcaccttaaatcataaggcaaagaataggatacagtcaaagcaagaaggtaaagaatcacaatagagataggaattaatgaaacagagagtgagtcattttatgtttctctttgcaatttttggttacagagtgatggtttgtgatagtttatttaaataatgtattcaaaccactattggtgaaccttttcaaaacaggcagcattttggacccagcacggtggctcacgcctgtaattccagcactttgggaggctgaggctggaggatcacttgagcccaggaggtcaagaccagcctgggcaacatggcgagaccccatctctacaaaaaaatacaaaaattagcccggcgtggtggagtgcacctgtcgtcccagctcttgggggtctggggcaggaagatcacttgagcccaggcggtagaggctgcagtgagccgtgtttgtgccactgcactccaccctgggtgacaaagtgagaccctatctcaaaacaaaaacaaaaacaaaaacaaaaatcagacagcatttcagtttgtttaatcagaaagactgtgtattgtgcaagagagttttcactggtcctcttgtgatggttggagctacataaagggcctcccaggtaaaggtgaagggaggaggtacttgcagccctgacactttttgctcaccttggttgaggtaggaatcttcttttttttgtaatggcacaatgcctgatatttactgtgaattgtaacacagagaacacaaacaatgtacccctgggcgaattatcacaaggcaagcaaatttggaaccacgacccaggtcaagagacccaggtcaagagaatagaacttgccgacgttccagtgccttcctcaggactgatcccagtcaccacccagtcttactttggtttatagttttattccgtaagtatttctctctaaacttgtgtaagtgcacctattctttgaactacgtaagtaaaataatagagtaggtatttatttttttgtagctagcttcttttgctcagattttgtgaaattaatgcaggttgttgtatgcagctgtaagtttattcatttatcttcattgatatacagtattctgttctctctatatagctctctctctctctcacatccatcctattgtttttcaatgtaattcacaatttataattgtataagtatctaaggtataaagcgatgttacaatttatgaatacaatgtgaagttttaaatcaagctagttcccacatccatcacctcaaatattaatacttaacattgttttgtggtgagaacatttgaaatttgctctcttcaaactttgaaacacaacactctattattaactatattcaccacactgcacagtaaagctttaaaaaagaaaaaagaacatatacctcccatctaactggaattttgtaccctttcggccacattgggtggcttggaatgcagtggctctttcaagagttgaggttagaaagttctttgtacattatttaacattcttccatgccagcaaggcacttagcccaatcaaggcaatttttcacaattttctggtcattaaaaatatactttaaaactatcaacttcacttgagggctttcttggtgctgctgaatcaaagctggaagtctcgccatactccattcattttactgctggtttgattattctggccagcacctacactaaatctgagagcctgaattttgtgcccaattaaacatggaattaaaagctcagagaggcacatccattatcaaaattgggccttttcacaccatacactcactcggaaaacatttcctagtgaactaataaaccttagccgttttcattccagcagtgttgctgtgtctctctgttctcagcaaaaggtctacaagtctgaacggaatccaaatgagctcagttcctgttaattgaaaaacaggtaagtcaggactaattttctgaattaatagtgtttgtcacagctttgaaaatctgcttaagtcaggtcaaaagtggctcttcggttggaagaagggaatgagccgaaacacaaaggtggagtggaagcccgtcccaacaccacagttctttctttgttgcggttttcccatttaaataagttgtatttacgtaacagagaataaagagaaaaatgtattgaactttcacacttgaccacaataaaaatgtgttcctttataaaacagtctgataaagtattaaagctcaaagacagctgcagccagatagcgatgaatacaactgaaaacaattggctattattgatgcaaacactatgaagcagatctgactccattacaggcaacttaggatggaaagagaccattttatctatattgaaagaataagagccacgtatatatttgggtgtagagacactgaaaaaattgatgcaaaaagttctgactcgcttggggtaacccactgatgtttctatccccttctttccaattcatttgcacacaaatctgtattaaatatccataactcacatctgggattgtgatcgagggtggatggtgagcagtaagaagttgcaaagtatggaaaagtcctggtccctctcctccaggaatagaaaactggaagaaccccagggaatggaaccattacgtcccttggttggttaaaacccatctcttcctaaacctaaacaaaacaaaacaaaaaaaatctaagctcattgtcatgttggaaaacagaagctccaggtctcatctggttaaatacgtgtataacaagggtgtctgggaatttgaggccattccacattatcttctcttagccattccagaagtttcttgaagatagcttctattaggattcagcatagaacaataatagaaaagccaacctgtttcatgtctagcatggacatgtgtacctgctactctaaaatgtagctctgagaatcactttgaacaatgcaactattgtttaatctgttggtctcatgactcccttgaacaagacattgggtttgaaaagcctggaaatcagaagctcttggggccagaggctctgccactaaatgaaggtctctcttctctggaccttaatttttctcacctgtaaattaaggttatgtgatatcttcccaaagttcccttactctctggcaagttacatattgttgctctctgaaattcagtctgttatatgttggaacttttgagggtaaatttttaaggaaacactacgtgataacaaagaaaaaccctggactctgatgtcagtcatgacatcatgaattcctgttctacactgtgaccccagtcaaattactttcccactcagagcttcagttttttcatcttcatgggagaaataagaatatctaccttggctgggcacagtggctcacgcctgtaatcccaacactctaggaggctgaggtgggaggattgcttgagcccaggagttcaagaccagcttggggaaaatggtgaaacctcatttctacaaaaaatacaaaaattatcctggcatagtggcacatacctgtagtcccagctactcaggaggctaaggtgggaagatcacttgagtccaggaagttgaggctgcagtgagctttgatgatgctattgaactccagcttgggagacagagcaagaccctgtctcgaaacaaacaacaacaacaacaaaaaaagaatatctaccttgcaggtcattcaagaacgaaattgggcaatgtaggaagacaccagtgcctggcatttagtaagcactcaagaaatcatacttattattcttgctgttacttttccttgctaagacgttcaatgttgccttttgtcataagcagtacaattcttgcctcacattcatgaggcagatgctaagctcactatgccagttttctcttctacctgggtgaagctatcctgcatctcccagcatcccctgtggttctgtgtgcacatgtgactgcattccaccaatgggctgtggatagaaaacctcctacttgtaacactctttccttcttttctaacttaatcagacaatgttggaagccacatgtagcagatagcagagccaaaagctagaaggatcttgggccctagaattactgcttgacagagatacccaatggtcagaacactctttttagactttgtgcacgagagggaaaagactgctacggtctttgagtcatttttacacttcttaatttatttatttcagcagcatttcagcagctagctttgtcttttttttttcttgttcttttgagatagggtctcactctcacccaggctggagtgcagtggcgcaatctcagctcactacaggcatgcaccaccacacccagctaagttttgtattttttgtagacatagggattccctatgttgcccaggctggtctctaactcctggcctcaagtgatccacccacctccagactataggtgtgagccaccgcacctgaactgtctaactaatttgtctacagagactagccatgatttaaagatataatattaaaaaataaatatgagctgggtgtggtggctcatgcctgtaatcacagcactttgggaggccagagcaggaggatcacttgaggtcaggagtttaaaaacagcctgggcaacatagcaaaacctcatctctaaaaaaaataaataaataaaaatattaagcaggcatggtggcacacacttgtagtcctggctacttgggaggctgaggtgggaagattactaagcccaaaagttagaggttacaataagctgtgattatgccactgcactcaagtctgggcaacagagcaacccctgtctctaattgattaattaattaaaagtaaataaatatgaaaggaactggtcttcctttttatttacctagaattgaaggggccgttgctcttccagttcaatgtgactaacatttattgattgcttttctgatatgccagaccagagagagaacctccatgcagaataaagactagggcctgtcacatatgggaggtcaggatagacagcaggagagccagttggcccaaacccccatttgacaaggctttggagttaacttcttgatgtcaccttcaaatgaggctatacccagaaccacagaatgacccaacaagattaaacatattctccatataatatctaaaaattttcgaaactttatattggcaccttatataatgtatgttatataatataaaaccttatgttatttaaggttttaaattattaaattatttaaattattatatattctttaaatatacgtaaacctaatttttaaatatataaccttatgtaatataccttatatttctttttttttcatttttcagcataccagaaataccctgaaatgaaacagtttgattctctcatagtccctgttcccaagtatccagtcatgatcacacataattacgttaagtgccacaatgaacagatagagtggctaaaggaggggcacagattgatgaagagagtggtttattcctttgggaggtgagtggagcaggcttcccagaagaggtgggtcagaagcagctgataaagatgaccaggaatgtccaagtggaaaagttgagatggaaggtgagctggggagtgacattcctgacaaagaatgacagtctgccatggaacaacgtctgggagcctctgaagggttttgagtaggagaataacccaactacatctgcagtcgacagccatcctttgcacaatagtgtgaaggataaactgggaagggaagtatcattggcacagaggacttaaggagtgactatactaatctagaacaaagcatgatgtgctgatctaagaaagcggctgtgggggagtccatgatggggcaggatcaagatttccaggaggttcgggtcatggtgctcaataggttctgaggttgaggaagaagacgtcttggatcactcggaggtttcagctttagtgactggctgacaggtaactttcgtgatgtttaggttagtccaacctgcccacatgctgaccaataaaggtaaaactcaggacttctcaggtcgtctcccacttgctgtcattctgctacagtgtttacccaaacctagacactaggtttcttgttgagatctgttttggccccatattctactggactcacagaagctccttggttcatagaaaatggctacttagactaaatcatggaccagttgtactgtatttgggtctgtgtgtgtgtgtgtgtgtgtgtgtgtgtgtgtgtgtgtgtgtgtgtgttcctagcaggcttaattgcaataacatttatgtcacataatatagtgcactgaggttgtaattttcctatcatctaaattgcaggctgagaactgtgttaaggaaggaccgtagagaatgaattactgctttcaaaatgactacttttaacagacaatgtgaccggcaaatgaatgctagagccggaaggatattttgtatttaatgtcagctgtaccccaggactttttaagtgtagctaactcacaccatttgcatgttaaatttataactaacacctggtctacctagaaaatcattttttctacttaatgttatattacctttggaaagcacttagcagctatttttgaaaacatggtgctgacagttcaacctgtcaatttcttttagactctcctgacaggtaggcctgggtttggttgcaatgactcagcgctggtgtgcaaattgaaaggggcaccactggttccttacaaggagcgcaatgagcaagtaaacattcagcatcatacacccagcagatacttattgtttactaaacatggtgacgattaaaaactcgtctcactggggagcaagcatgatcgttgcaaaggtaggtactgggttcaaatcctgctccaccatcaactccagcatccaccacatggcctcagcaagtaacacagcctgtctgagcttcaggtccctcatctgcaaagtgggtgtaagaataaagcaaatctcacggggatgtgggacagtaaaggaggcagtgtctaggaagtgtctggccagggtgagtcctcagggagggacagcctgtcattactgtgattgtcctgggtgacagttaacctggaagacaccactggataggattctgtcctgtgggagaaattcagataacaattcaggtgaatccaaagtcataacatctcaggaagcctccaatgtcaaagctttcagagacttccatgctgacgtggatcagagcgatgaggcgccaaaaaggccagggagacctggtgctgcggagatgaaggcctccttctgtggctccctctgtgggccctgggtcattgtccaccgccttcggatctgcttgcacatccctccagcccagagcctgtgggcccatgctcctttctctgactcctggttgtatcgtttgaactgttgatttgctggggctccaaaattagaaatgctggctgtgactgacccaatgcaacacagccttcaggagactgttactccagagccactgaccccagatatccatccccaagaacaattggtcacatgaactcaacttttagccaaaaggttccagcacaagctcaggcctgagggggaaaggctgctctgtggtgtaggcagagcccctaagagtcaagacaccctcatgggcatgctcgctgctggggtttgtctgggaggagagacaggtagacgaaggatggaaaggtttgacatctgccccttcctactttccttctctttacccttccttgctcccaagagcccttttgaaaatggggcttttaatcaatggcacaggaacaatgaaatagttttggaaaaaaataaaattagagccatacctcacaccatacatagaataaatataaccaagataattagaggtctgaatgtaagaaaggaagctgtacaagcatttggaaaagacacagtgaactcctctataacctgctgtggaggaagggcactgttctacagtgggcaggtctatgcaaatctgctccaaagtccaaggaagctgaaaggcccaagaaagaggctggcaaatccagtttcttcgaaagaaacacttaataaggacctgggaacagaagttgtgtctatgtcttgggtggcgatgacataagatggtggatcccatgccatcacccccagacccagggcttctatgccatagagaaggggtggttcagaagggatgtgtaggataatcgaagcacagtaataccaaggttgtttgggatttacggtaaggacctgctcctatacaaggagcaatagataaaagggaaatcttagaggcttctcagaacaggggttaatggaagccaacctggcagattagcatctaagatggagtcgctttggctccacacgtgctctaactgtggctaacatctctgctatggagagacttcttaacaattgaaggaaaaaagagcaaacatcaaatagaaaaacacacaaaaacacaaacagacaatttgcaacaaaaggctataaaaatggcctttaaacacatgaaaagatgttgaaatttgttcatattaagagaatggcaaattaaaattaggctgagacactatttctcatctatctgattggaaaatattgaaaagctccacaacacactctattgataaggctgttcgggaaataggcactctcactgctacaactcttgagcgggagcacttggaaacagctaacaaaactacatatgcacttgcctttgacccagatataccgactctaggaatttactctaaagacacacctttaatgatacaaaaatatataaacacaaggcaattcattgcaacctggtttataattgcaaaatattgataactacctagagacccaatcacggagagtatttgaataaactgtggtatatctacacaacggaatattgggcagctgtgagaaatattgagaaagattactgtaaactgctatgaagtgatttccaatgttcagtgaagaaagcaaagtgcaaaagagtatctaaaggatgcttccttttgtgtaagaaagattaaaaaattataagcttatttgctaatgttttgcataaagaaatacagggaggataaaccagaaactaacatgattagctacctctagggaatgggttggaacaggatggaagagatagtggggtttgaatgggatggaaaggattaggctggagaggaagagacagtggggcaggaatggagtagacttaaagaaccatgttaatttttacaaactcagaaaaaaattaaatgaacaatgtagaaaaaatattaaaataaaatgtaaacagaaacaaataaacttaattgtcttttaaagaaataaccatcatgaatgggagggaatggttggtccaaacctattatggcctggagtgctttatttccctacaagcctactttagcatgggagatggtacttttgtacagaaagagccctgaaggagaggagagaaaacttagtagaatgcatttttgaaacgatccatcaaagctcttatagcacatgttttcatgggttcttagtgtaggagcagtttgaagtggatttagttttatggataataaacatgagggtaaaggtcacatcagacattttgttgctaaaggcaggtgatactgagattatgtagacacacaggtatgcaatctacatatttttaatgtgaagagtccatgagggtgagtccagcatgctaattgcttgatgccaccaaaaagtataatcttgaaacagaagcaagaaatatccaaacaggccccaaataagaattttaaatggcttttcctcatcttccaagtggagttctacccacacagatttattgagtgcttactatatgccaggcacttttgtcccaggacaataagggacaagaccctcatggagacagacaaggaaaaagaagacaattatcaaagaagacaaatttgaggagtgagcaatgacttaaagacaacagagtggaggtgggggccacttgtgctgagatagtaaaaaaaaaagtcctcatcaatgaagagacatttgagctgagatctgagtgggagaaaaggcagtgtgcagagatccagggatgagtggaccaggcagagggcacagcagatgcaaaggccgtggggtagaaccagcgtgtttaagaaacagaaagaaagccagcatggctacagcagaacaaacaggagcctggcatgagattaagcaggatcacattataaaataataaacccacccagataacgctatattcttaaaagactgacccaaattatattctggttccctgaacctgaaaattgtgtttctacttcatgaaaattcctatgccagagataaaacttgaaaaggatttaatgaaaaacctttactctttcccttatctgttctggtttagctatttcctcagaggttgtcaggcaaggagaggaagctagcttaatgtttcaaaaatgccattactctatgaagagtgatgctgcttttgctaagtcatgaggggaaaggctactcttggttgatgaaactctcgatatttatttattaaataattgtttaaggcaaatggggatttctgctggaagaagcttcctataaccccacctagcaaagtggagaggcacaggtgaagagagcaatttcatggttcatgctgctattgatgcttcgtcatgtcctttgagagcaagactcttttgttcaagtttggggaaggaagtgtttaagttttaggtactgtcaaatttggccatccaagtggaaaccggggggctttctgggaagataagagaacagaactgggggactcttccttggtgaccagggagacagctccattaaccaccatccaatgcttaagagggaaggacccaactctttaccgctctcacaaagtctggtccagaacaatcagaacccaaggtcatttgctgcatgagctcaccttcttcttatggttggagctgtgttgataatgagatgctcaaagggaccattaaatgaatgcttcctgtgcatggctgtatacttacaggagagctgaggagcgcacaggagaccaagcactccaccatttctgcttcactgagcacggagccatctctccttcgcagagcagaagacattgctccagcaggtacgactttagctagtcctggcccccagcccctggggtgccctaagtcatgctgagtcctgcgcctggagagcaggagccctgggaggagcactccagacacctccttctggagccagggatgccagccatgccagcgctgggctatccatggtatccaggagacagagccttgttgacactgccagtgtttgtaaatcccaaatgcatctggcctcaggaaagttgttaattttaggtgggttttggagactttttcattagcagtgcgcctcaacatacccagcatgaggagaaaatggaaaaaactgaaatgatttgccgcctatttccatgagggccctgctgttttctggaagaggttcagagttttgatccttgtaaattagtttccagctctacttcaggtgaagttaaccattagggatcatttcacccagagagatgaacaatcaggacccggaacactgttttgtttagccaaggaaaggagtggccgggcatagtgactcatacttgtaatcccagcactttgggaggccaagacaggggatcgcttgaggtcaggagtttgagaccagcctggccaacatggccaaaccccatctctactaaaaaatataaaaattagccaggcatggtggcatgcacatgtagtcccagctacttgggaggctgaagcatgatacttgcttgaacccaggaggtggaggttgcagtgagccaagatcgtgacactgcactccagcctgggagacagtgagactctgtcaaaaaaaaaaaaaaaagaaagaaagaaagaaaagaaagaaggaagaaaggaaagaaagaaggaagaaaggagaaaaaagaaagaaagaaagagaaaaggaaagaaaaggaaaggaggccactcacattcaaacaatgcccacaggaccctgtaaacatggggttgcctctttcaaattggtagaaaaaaagaaaagaaagaaataattcaaatagaagtctgattttccttaaacatttaaaattaagggtgatttcaataacttgctataaacaaagcctaatcccaggatcttgtggctggtctgggctcaagtactatgtttgcagtggggtcatttatgagaaaatctaccagctccatctctatttttgtgttcctatatctatggaccatccccttccaccctaaccccatcctttcttctctcgattatacagttttcttgggttattactgtttaagttcaatggggtttgaatgcagcattaagcatcctgattgttgatggtagtggcaattacagtctgggagaccttataatttctttaggaaatccaagtccgagaggcatcatgagcatatgttctacattgctgtgccttcagtggaagtacttccttataaaggaaagaggaaaccaaagcgaacataccaaaaagatccattcctttagattagaatagaaacaggcagatgccatagaagcccgtgttcaaaaagaacagaacgtagaattttgatgttcttatcgtagttggattttggtatctaccatgataaataaattgttataaacataatacaaatggataaatgtatttcttgcgtacgacttcaaagatttctttgctttgggatattttattttttctctatttcttttaagaggaaggagagtgggaaaatataactaaaaaaaatagttgaccattagctctttccttctctaagaagtcttaattcccaacacatcacactggattgtcagcaccatctgggcagacagaattgtcccatgtaaagcccactatcattgaatagcaaataacccagctttacatacatatatatacatacatgaacacatacacacatgaacacacacacgtgcacacatacattcacacacatacacacataatacatacagtcacacatacacacatgtgcatacacattcacatattcaaacatgctcctccatatacatgctacacactcacacacacactttacctttgcttctgaggggagccctagtggccttcttcacatgtccagcgaataaagaactctcactctctgtttaggcacaatgagatctgaataaaacatcaaattgtgccaacgagactcacggtcaccttcttcaaggtgtcagtggcatctgaaacagcaacaacaaagtcctcatctttgatgttacaatctgggatgatgctgggcccggacttgtgaccaaggttcatccagcttgtctctgggccccgtggagagctgtgggaagacttgacagtgtcatcttaaaagcaggctcctaggtggtcctgggaaggagatgcagtgtgtcaagttaactgaagagctgggctccaagtcctgactgctctgggctggacagagggcaggtgcccaccagggatgtcaccgaggggctcgaggcttggggacagcgaggccagaccagggcgtagagaccttttgatcccgggcttagctttcagtgctggaaggcagtgcagtgggagttggagacgatactgatgtcccgcaccagcccactcgattccccagagggtcacaaggccaggcctgtatttagttagtggtaatgatctcgttaggggtgtgaatgggccaccacccaagacattcagtcctgccagcaggcctccccccgagccctgcctaccctgtgtggccttacacgggacgtgaactgtgattaacagacttccagtgcttaataatttgcaaaacagcattaaacaagggaagttgaggacaattggaatgggacattggccgggcaggaggtggttgtcaacagagctgagacaatcccgcgagcagggccttcacaaagctggcagggtacaatgtcacagctggctgctggcggggtgccgggctgacagcgcctccccgttcatccaggtggtgaggctgagccagccttttaactttgtgagtttctttaaaagggaagagagagaggagtgggggaaaagccctcctgtttcttcagtaggaaagaaagtgagaggaggcccattgagcaagagaaagaaagagattaagtagcaaagaaagtgacaagctgataatagagaacactttcaatggtggtaatccttgacatacaaggacaaatatgaatacttttgttcctgaatttagattaactttgtgtcaggagagaaaccagaatgcaagttggtttgcttgtacctctcgtgaagctccgcgaaggcgagttgacagcagattgagaaggcccccggaaagcggccgcgcaggggatattgacgggaacaactgtagctgggcagtctgtgtattaaaagaccacagtggttgaaggcagaacaggcgaattattaaagatgtgagatgtggcggcgtttgacctgtctttctttgtctcactgtgttacataccgtgaggtcacctcagccctgtggacgctgtttaacattcaaaaatcataaaagtttcgtatttttaatatccatcacatgcagaaaatctgatttttatcagtgtgtattcaaacttccatgtattaggggccactatccacggttctcagagcaacaggaagttggttttatgggaacgtcgtaacgaggaggtcgtaacgaggaggcttgtttgactcccaagaaacataataacttattaagacccaaggaaaagacgagataaaccaagaatggtctgggtgggctttatttgtagcttcttgtgagttccgttttttgagcccactacaagagtctagccttctgcttaggggacactgatttctctcctgcttactaatgagagtaagtgtcctccacacctctcccagcagttcccgttgttaaacttatttcacgttgaaatagtccatcgtgctgcttccaacccaaacagcaggctgtgtttcctctggcaaatatctttcaaaacagagctccagctgccacactgggtgtgcccatggaatttgtcgtggtggtttccaaaatgtgtcctcggtatccttgagtgtggctgcagtgacactcaggagaggagggacacaccacagggggaaacatccaacacttcgaggtgttttggggaggaggtgtctgctggaacgaccacttgaaattccaaattgctgcttatgattaaagtgatgagttaacgcttctttaaaagaatggcgacaagcagctgggactgagacaatgagggtagtgtgggtgacggaggtgtcgagagaggtggtggggactttgcaggggagctctgtggatgtcatcaggcagtgacattgtgacattttgtgtatgttgtacttttggggccacatttcatccagtcaggatgactgacagccttattctgtgatttacttagcagctgggatttgtcttgacaaccatgcttaacgtgtccctttccaggattggcaggctccggagcaaagaacccgggggtcctcccgactcgactcagtgctggctggcagcatgtcccggcctcagtgcctctgctgtgaactggcacaggctgcccctgccctctgctgctcctccacggcctgtatcaccacccaaaatgggccttgccttgggccccttggaatctcctgattaaaacagaaaaacagaatgtgccacccaccaattttttctaggagtgttttcacaaagggactgtttttttgcaaaggcttgaaccaggcccattctggcagttctgaaaaagttaaggatagtttaatctgcttccatcaaaataactgtcttattgatttcttcctggacaaatcagaactggatttgcatagggcttccatatttgcatggggtctttaaagaactgatgaaaatatcagtttttttttaaagcattggaaattttgtgtgaaacagcagtgatggacacgtcattgtacatttgtcaaaacaagtagaatgtacaatatagagtgaactcgaatgtaaatgtggtctttgtttaataataatctatcaatagcaacaaatgtaccacactgataataataatcatcatcataggggaaactgtaggagggaagggaaccttctgtactttctgatcaatctttctgtaaacctgttatggttctgttaggattctgtaaaccttttctgtaaaacttgttttaaaaaatattttattaatctgtaatcccagcactttgagaggccaaggcgggtggatcacaaggtcaggagaccgagaccatcctggcaacaccgtgaaatgccatctctactaaaaattaaaaaaaaaatagtctattaatttaaggccggacacgctggctcatgcctattatcccagcactttgggaggccaaggcagataaatcacctgaggtcaggagttcaagaccagcctggcccacatggtgaaaccccgtctctactaaaaatacaaaaattagccaggtgtggtggcaggcacctgtaatcccagctattcaggaggctgaggcatgagaatcgcttgaacccaggaggcggaggttgcagtgagccaagatcctgccactgcactccagcctgggcaacagagagggactccatctcaaaaataaataaatgaataaaataaaacaaataaaaataaaaaatagtctattaatttaaaaacaaacaaaaggcattgagttgactcgcagccaaggtggaggatgtctgtcttcattcatagacacagggatttggcaggcgctgttgatgctccacgctggccgcccccacacccggctactgacacaccggcttgatggtttccatctacaagtgcccactcctctttgctggggcattttttggcccacagggggacatacctgaagtgctccttttccctgagagcagccttcaaatagtagctgagaggcattactggagaaaacccagctccccctggggcagggggctaactgcactgtctcccaggggccccagagggatgggcctttaccacccttcctctcctcacttcacttccccatgctcctcctgatgcctccttaattcactgcccagtttccgtctcccatgcacatcagtgtctgggagagaagcagaccttactcttggcataatccactgccagatgtgaaaactgaatgaaatgtgcaaagctgtgataggaatatgtgttttctgggttcagcctacttggatggaatgccactggggggatttataattcaaaacaaaaatctaaaaaaaataattgggcagtgcaaggtggctcatgcctgtaatcccgccacttcgggaggaagttgcagtgagctgagacagagccactacactccagcctgggaaacacagcgtgactctgtctcaaaaaaatagataaattggatgtaaagactaggtgactaggaagactgtctctttcaaatgaggcaccggttcatccagggctatttcctggctggttctggggagctgatggtgggaacatgagaagttgctactctgctttgctacttcgatttgaatttaagcctccagccatggagacgtggaaggactttcccagaggggagtactgagcagtcaccaggcttcctcccttcctcgcttgcttggggctggtgttcaccggactcaggacagcacaagggccagcacccatcctgcagcaacatctctgggcaagatccacgcgtgctacatttgcgggctccttggtggacagctctccttctctagcaaagcatgaaagagctattcttattctactcaatgactttgtttgaataggtaataggtgaatatgacataattatgcaatcaggaataatacaaaaaaaaatagacattctcctcttccattcccagtcttccagttctgctctccagagagaagcctggttttagtttctcctgtgctcatgcatgtatagtctatgtgtaaacagcaaatgttggtcctatttgttaaaaagaaacagcagtgtggtagatggcccccagggatcctgccccctaggtacttgccctgtagaaacgccttcttgagtgtgggcaggaccagggcagatgatgagatgtcgctcctgtgattgggttctgttacgtaagactgtgctgtagctatggctttgaagaaataagctgccacattgtcagcgggccacactgctggggcctgagggggttccgtaggagctgagaccgactcttggcctacagtcaataaggaaccaaattttgccaatgacctgaataagcttagaaagggaacctgaacctcagatgagactacagccccagtcaacaccttgatcccagtcgggtggcatcctggacaaaggctccacgtgacccatacccagcctcctgacctcaggaaactggaaaacaatccatttctgttgtttgaagctgctacctttgtgggaatattttacatagcaatgaaacactaacacaagtataatggtatttggaaaacacttgttttcctatttgttttgttttgtaactttttttccacttaaaaatccatcttggagatgatttcaatcagtaaatccttctttaaccctgtgtgtgaacagctatttgtttgtcatttgatctgccgaattcttttccaaagaagcttatgttttacaaatgaaagttcagtagcagctgtgcttggtcatacacttgggctgtcttgtcataataagtaacaaagtaacaacgaggtgatgcaaaagtaatgtggccaaaataattttctgatctttctatttttatctgttattttattggtttgaagatcaaactgatgaagacttttaaagatgaaggtaatttccaatggcacataataatttgtcctgttacagttataaaaggcaaatgcactttcttttcttatgaaagccacactagagacattcaggacttgtaacagactggcaagtatgttgctgactcagtttccctttcctctggcaagtagatgacctgtcctagtcttccttgaggttcagaggctgtgacctccagccaatgaaacatggcagaagtggtgcctttcccttaccaggctgtcccacagaaacctcccactggatcctccccactctccccacctcccacctgccagctagaaacaggattcaagagagaacttaaagttccaagggatggtggaacctcaggctgtgaagagactggccttagaatcaccccgtgaaaggctgcctcagaacacttatattgaatcatcatatgagcgagaaatagaacttccattgtgttaagctgctgaaatttgaggattgtttctttcagcagagagcttattctcaggatttactttcagaaaggattctctactttgcaagaggaatcatgccaggatctctttaagttgcaggctcgccttacacaggtgatatgaagccacttattacaaattgatctcaggggtacatcagttgtgcaagctgctggcacattcagggccatactcaaagtgggtgttcagcaaaaggtatgctccacagtaaaaaaaaaaaaaaaaaaatacgcaatgacatttatagtaagttctgattaacatcatgatctcctaatattaatgttttagttgcaaataaatgctaagtttgtatttgcttattattattattattgtgagacagggtctcgctctgtggcccaggctggagtgcagtggtgtgatcagggctcactgcagccttggcctcccagggtcaacagacgctcccacttcagtctcctaagtagctgggaccacaggcatgcaccaccacaccaggctaatttttgtatttttttttttgtagagatggggttttgccatgttgcccagctggtctcgaactcctggactcaagagatcctcttgacttggcctcccaaagtgctgggattacaggtgtgagccacagtgcctagccttgtatttgttttctaatacatgttgaatctactttatttgcttagttgatttatagctttcctgtttttaaccttattgtttgaatttccccacaagcagtcattgcaactcaacgcaaagcaatagaagaatttctttctagctctaccagttacttttttccactggaataaacatgcttcaggaaagtcagtttttgagtagcttacattgagttctaaggagttgtcccttggccaatgaggtacttgtgttagggggcaggtaagtttccattcagcaagattcttgagagttacatgcacgtcctgctggattatgagctctgggaggtcaggaaccgtgaccttctctgctctctccgtggcttttggctcagagcctcatgtagttgatggccaacaatttcccattgaatataagaatgattcagtaaaaagatcctttgccttttgtggccacacagatgctaggttagcccacatgcagaaatgtatctttaagccaagtacactggagatattaataataaagattcagttgagcatcctgtttgatagagttgccattctggttcattgattcatttttaggtctcaggtcacagaatgaggactggatggacagaactttgctttagagcctgaaagaatcaataagctccccacgggaataagaagaaaacatgaagctgtgggggaagtgggacgcttctgcgtaggaacaggaaataaaataaaagacattgcctgaggccagcttttctgaaatgttgccattggcagccctggagatccacttgagtaaacaatcctgtgaaacggaagaaagcattccaagaacaagcccagggaatctgcagcactgccgctgcctcctcttaggaaaagaagcggccgggcgcagtggctcacgcctgtagtcctagcactttgggaggctgaggcgaggcgggaggatcacctgaggtcaggagttcgaaaccatcctggccaacatggtgaaatcccgtctctactaaaaatacaaaaatcagctgggcgtggtggcgggtgcctgtagtcccagctactcgggaggctgaggcaggagaattgcttgaacccgggaggcggaggttgcagtgagccgagatggcgccactgcactccagcctgggtgacagagtgaaactctgtctcaaaatagagagggagcaggagagaaagagggagagggagagcaccacgtggtcctcgctgccatctcagttgcatttcgggtttgcgtctgtggttgctgagagctcagagtgggtggtgtgcagggccacttgggtttcccaagtgggatgggccgatggattatttatgagaaagaaaagaaacgttttacctgaggaaagtgagcctcctctaaatgatcatgcccagggaggcacaggaataaggcagcaattacattccacttcccttcttgggctgaagtcattaactcttaaagcctcttgctctgtggactcgactaaccgcagcccgagcggctttgctataaattaacagaccaacgcggctctccgctggacaccagcatactcatacccccaagttcaatgtccagccaatcattaatcgatgttatttctgtcaaccaatgggaattcttgacaaacacctttgtgtttgcccattcctcgttccccttttatcctttaaaaacgcgcttgtaacaaaggctaaatggagctcatatccaaggtgacttgggtctgagccttccgggcagctgtcctcaccttggctccagtaaactttgtgaaattatatctgtgcctcagcttcttcctttaggtcgacatttctgttttgatgaagttacgttttatagactttaggaggaaaagagaagagggggaaggtgatgaggtataaaatcacagtaaagactgggatgaaggaaagagtacagaacttgaaaattgaagttgggatatttttgttgtcatgaaaggacctctacacatttccacagtcagaaactcacttcgaggacccaattgcactcccctaccttgctttgtaaatttgaccatgggcttggctgtaaatccacattaatttatcttgaaaaaaataaatggtcttgctgtatttcaagatatgatgggatggcggggacttctattgggaaaaggtgtgaccaatagagacacagtacctaaaaaaagcccaacagtaagaagtgttaccattgaaggctgggtgtggtggctcacgcctgcaatcccagcactttgggaagatgaggcgggcggatcaggaggtcaggagttcgagaccagcctggccaacatggtgaaaccccgtctctactaaaaatacaaaaattagccagggtgtggtggcacacgcctgtaatcccagctactcgggaggctgaggcaggaacattgcttgaactcgggaggcggaggttgcggtgagctgagatcacgccattgcactccagctctggcgacagagcaagactctgtctaggggaaaaaagaaaagagaagaaagaaatattaccattgaagctgaggagtggaaagggcatggagggagagaggtgaattttgcaaacaaatagaaaagtccagcaagcctgtgtgatttgtttctattgtaacttttggccaactgccactggctgagtttccagggatttctttctgttttccctatatatggtgagatcataatgacttttgatgttttcaagatagaaaagcagggtgaaaagttattgcaaaaaaaaaaagaatccaaagcaaaataaataaaagtccatgtagaacgtaagtaaggtccccatctcagatggattattaatgcctctgcaaatgcctgctccattctagaagcaggtagatgttcattaggtgtttgctgaaactttagttcaatgtatctgtttgtcatttattaggaatcaatgcttctaaacattctatagcagaaaataacattttccttttgataggaaaattgttttaatgaactattacagtatctttccctcttgactcccatgagtttaaaaatgttgaacatcagataacacagctcttaatttcaatgggcttcacatcctgaatgtaactacaataacaaataaactcaccactagatctcaatttacttagaaaagatcccagctgtcacccaaagccaaaatgggtggagacagtttggttcacagatgtggatctctggctattgaaaaagcattttcagacattattaacaagaagaattggcccagtgaataatacaattatgcatgatctgtggttcagatattcaagtgcaagtattcagaaagtgctgctgcagctaatccagggggtagttttgaaaataatgacatttaacctatcatagcaattgttcttgtaaaaggtatgaactgttctaatgaagaaaagaatccagtgtaaaaattatgtcttggtgctagaaatcatgaagctgaacagtcagtcttacattattaagtcccctatacaggggaaaaataaatacatttaaaagtgtttaagaaatttctgtaaagaggaaaaataccagcaaacaaccatttcttccgtgaatttctagacatgtacttgccaagttcagtaagaaaaatgttaatgattattcaaagcatcacatgaaggataacagttaatctgattagagtaatgacatttctaatgtatttatttggagtagcgattgctgaattgcactgttattagcaagcttgccctgtttactggaatgctgatacatatttaaaaaatctgtctttgcataatgcaggctgagcatgtggacaatagaagggggtctttagctttcctatcctcctttatgttttatctgatctgcctgccttgatttggaatgggccccagggctttgttattgttgatgcctctgctctctcccgtccctcccggttttggcctccttgggttctgatatctgatacactcatgacacctccgaggaatgcagctgagaattcattgtccccaggctttttaagcatccctgtgaactctcctttctttttctagttaggaaccgtttctcatgcttgattagttgattcaccaaccttaaaattattgcatttgtagtagtatcaattgcccaaaacattcaagcttataacactgttggctgcaagtgagacaggctagaactaagacccctgcaacctgaggattttccaaaattgtgatctttaatgaggagaggggaaataaatggttctatcaaatccccatcttagttccattcctttctgaaattgtaaactcatctgtactagtttctttcattttgcatctcaagagccttcattggaacctgaaagtttaaatccatcaaaatgcaagaatggaatcaaatgtgtattttttaaagagtggtgtgaagatgcaaaaagaaaaagagaagttgttatggtcagaatgtttgtgtctcctcaaaattcatatgttgaaacctaatcaccaatgtgattgtattaggaggtggggccttcagtaagtgattagatccttatgaataggattagtgcccttataaagaacacaggctcaaagagtcacctcatcccctctaccatatgaggacacagccagaagccaccatctacgaacaggaaagctaaccctcaccagacactatgcctgccagcaccttgatcttggacttcccagcctccagaactatgagaaataaatttctgttgtttgtaagttacttaggctatggtattttgttacagcagcctgaatggacaaagacagaagtatgatccaaatactggatattggcagtctctcctatatgaacgacttctgtttatgtccccagagcttaagtgaactggaggatttggacagacctgtagctaaaccacccttttgaagctattgaattgatgggatgatagtttcatcaaccaatggatatctattgagccctggctacataccaggctttgaataccaaggaaactaagacagatgaggttcatctgtgctcccatgtagctctccagagtgtcacagactctttcttattgggatttttaacctgggggattcagaggtcagtaactatctggaattatggtaacatttgctcaagagtgcagaatgatattgtccaataaacaatgtactgactacattgatggttctcaaaatgcttttactctgagtggtataaaaataacaagtcttggccttggaggtaggtaatagaacccctgaatagggtcagtgtggagatgggtggcccagcaggctccacatagaccaagatggagagggcaacagaggggcagggcatgggtaaagctccttctggctgcaataaagacccaggagctggagacaaaaacttttaatgggggagtttgatgagccttcctgtgtaaaatcatatatagacaaaagggcactgtttagctagtgatggttgagttaaacataaggtcacaccaacaatttccaaaatcaataaaaaattattagaataacttgataagctatattacttggtaagccatttcattataagatatataatataaaatatattttatatgttatataagatatacttttattatactatataatgtaccttatatattataagaaattaacttatttataaaataaggaagacatatgttgatttatatattaatttatgttactgtgccagttcttaaaccatcttttgaatgttattttctgtctacatctggatttttcagaaaactgtaaccatggctttcattaaattttcatgtggttctaatattggcagggcctaggtacagatggaggccccatatcatgtgcctgaatatttaaaacttacccataaagcttctaataaaacatgttttattcttttaccttgaaaaatattattttataagatgacctgaaaggccaagtttacatttaggattcttggactcctctgagtgcccagcctacatgtggtgacgcagggaaggctggcccccagtcctcagcatgatgtagggttttttgctccttagttcagctaaaatcctggtttttatctcatgaccaggaaaaattaggtacatggacacattaaaaagtgaggagagcagaatatattgaatgaaaagaaagctctcagcaaagaaacagggggtcctgccaacaggctcccacctcacagactgaataccaggccaccacacatgagctgaagaagccaggatcctccccctgcataaggcatgaagtcccagtggctctaccccactctcctagtgctcaggcggacccccaactccattgcagacatatccagacaagaccctgggcaagttccctcatctgcacaaaagcatctgatgtaaacacttgtggggcaggttggaaattctccagggaccctccattctctgcctcctgcatctatcagtatgtcctaatttccttctcttttcacctccagctcgctccttcacctcaaaatggccagatgtggacatcaagactcacccacatccagtagcaaatggccctcccaggcctggggttatataatcacaacaggatagacctgggcaagggcttgtccagaccctggatgtaggttcaaggctgcgtgcatagtgaattcagggatcctggttacctgagcatggtccaagggaagaaggtaccaggtgggcatatcatccccaagatgcccatgcttaccgggggctgttccctccaatgacagtgtgccatggtctaccacgtagcaattcaagcccattcctgtgagatataaggttctttactgggcaacattggcctgagtgaaatctcctaggaactgccctgcagtatgagactttcttaaccacccctcctgtctgtctcctctccttcatgtggtctgcaggttctcctttggctggctagctccccttcatccttcacaggtgttttcctttgcacatctaatttcatgctggtatccacctcttggatgacttgagctagcacagatctcaattattataaatctacattttccaaggtggcttaaattttaagtattttgttatattatccctttttaattcatctatagaaaatcttatccagctccatggaatttttttttttttttttttttttttgagacggagtcttgctctgtcacccaggctggagtgcagtagcgtgatctcggctcactgtaagctctgcctcccgggttcatgccattctcctgcctcagcttcccgaatagctgggaacacaggcgcccaccatcacatctggctaattttttgtatttttagtagagatgggttttcaccttgttagccaggatggtcttgatctcctaacctcgtgatctgcccgccttggcctcccaaagtgctgggattacaggtgtgagccactgtgcccggccagctccatggatttttaaaaatgttttattttgaaataattataaagtcaaaggcagttgcaaaaatagtggacagtcctatgtacccttcacccagcttcccccaatggtcacatctcacattgcttcagtgcaatttcagcacatggattctaaaaccaattacatgctgatcactgccccattttatttctagctcaaacagaccctttcacctgagctctggatgcatctcttcctacctattcagcatttccacttggatgtctaacagtcacttcggttttaacatgttcaaaatagaccccttgaaccctggcctccatcatccaagtatttctcagtcttcttcatttttgtaagtggtactgtggccactaagtcattgaaatcaattatcttgtgaagcctgtgcttacttgtcatggtagacctgtccccatgggaacatgagggcaggaacctcatctgtcctgttcattgtggcatttccagcaccatgtacaatgcttgggctggagcagatgctcaataaataatttttggacagatagatgtttttggtagagtgaatatcatgatgttatggtcacagatgacatcaaccatcaggatttggctttctgagccatagtctacatgcacacaagatgaatgcctagaaaggaatatggtgtgtcttataaatacattgacaagaaacatactcacctgattaggaaagtttcaacctgagaattgagtgaatggcacagataaaactcggaataaatatccttcctgcctcccttcctccttccttccttttcttctttccttctttccatcacttggttgctcagggtacattttcaagtaacatttagaagagtacattgacctctttcttacccttgcatatttgatgggcaacatctttctttgacttcctataagaaagaaaacgagattgaatcacagcttgctccctcaccattttacacaaagtattgatgtcttgtggcattttgtgtgctagggaagtgaggtcaatttctttttttttttttcccaagacagagtcttgctttgtcaccgaggctggagtgcagtggcgaaatcttggctcactgcaacctttgcctcccatgttcaagcaattctcctgcctcagcctcccgagtagttgggattacaggcacccgccaccacatccagctaatgtttgtatttttagtagagacagggtttcaccatgttggccaagctggtctcaaactcctgacctcatgatccgcccacctcggcctcctaaagtgcgaggattacaggtgtgagccattgcgcctagcctgtgaggtcagtttctatgccttcttcttttcatccctgcctggatgcttgaagaatatgacaaagtggttaacaccatgggttctagaaataggcagttcagattctagttttgctgtatgaccttgggcaagttatttcacatctctgaggttcagtcttcttacctgaaaatgtgggctacaacccctcttcatatggtcactgtgaaaattaaatgcaataatatgcataaagcacttcaggccagtgcctggcacctagcatatgctcagtaaataccaatgcttcactttccctttgaaatctaaaatacttgatgggaagaggaaagatatttattacctttgtagattttagcctgccaaacaacatgactactcaagtctttgtctcgtcttgtttttgcttttcttttcagtgtatggaattctcagcttcaaacagtaagcctgcatcaggtctgtgtcattcaaggggccaaagttccagctgccatggccttcttcaggacagcagcccagctagctggaggctgaattgggcgacttacaagtggttgcacctccacaatgcccttgtagctcttgccttggtgggcattgtgctttggagtggaatcacctcacccagaactattgagatgacttacggttattagagctgccatctttgcacaccaaatcagagcatgaatgttgtgccccagtcaagacaatcagaaatggctcttcagagggaagtaacaaggtggagaagaagaccagataggagaaaataaacaacaggatgtgagaaaacacccaggcagaggtggcagccataaacccagctccctacccatcaggaaatgggccaagaaatcaccaggactatcccaagggagttggcaaatttctatgcaaaatctgggcattagtctgaataaatgaatgaacaccgaatacatgaataagcaaagcagaatgtacagacttcagagctcttggcaacaagtgcaagctgggtcagacataagaatagtggatggagcaagagaacaaagtcacagactgaatattgagggttgctccaagaaagggagactcccaagcacaggactgagtcagggagctctgtctggtacaaagcctcagtgaggaccaacagataaggccccatgtcaatgaaggcagctacccaactggcttcatcagtgactggctaatattaggtccactccattaactaaccaacatttcatggaggtctccagagggacctttggagcattttcaggtgttccagaaactaattcagagtgtgcacatagaagttaaatcgtttcaggtcaggccttcctcagggagtttgtccagagggaataatgggcccatgctggagctggaggtgcctccagggccaccagcaacctgcattgctctgcaattatcagaagctccatcttagtgtgaattcacagacctcaagacaaggatatgggtgcaagagaagtgcagggaacactggagagaagtggggaactgaaacctggaagtaacgacagtcaatacatggtgcattattaagccagctgtcactttggacaactcaagcttaatctcatgggaaaattgggaaacagtgcaaaacacatgtctcagaattacccagctctattagggagagagctggggtattgatacaccaaataaataagagtcattggctgaaagctgtttcttgtgagggagtgtttattcctagtacttctgtccatgtatttgtagttagaagttggccagagcacactgaaatagtagggtctgaggtttatcagttagtttcttctgcataacaaaccacgtcaaaacttagtggtggatgatagtatctattcttttttaaattaaaaaaaaaaatttctaccccttcttcttctgaaaataaccctctattctactcacaattctgtgggtcaaaggtttggcatctgcagtcagccatcaagtccgctggtatctacatgatctagcacggctttactcacatgtctagtgtggacaagctgactgttgggataatgagtgtgactggaccaggctggtctcagcttcttcacctgttaatagtcaccaggttccaagaacaacacaaacgtaagcctccatgtgcaagttcttttgagcctctgctgtactccacatttgctactgtcccactgaccaaaacaagttgcatggccaacccaaactggtgtaagattatcagataaaatgtgatatgtcaagttcattttgaattttagataaacaagaaataattattttagtattagtatgtcctattgaaagatgtggtattagtcagggttctccagagaaatagaatcagcaggagatgatagatagatgatagatacatagatagatagatgatagatagatgatagatagatagatagatagatgatagatagatgatagatagatgatagataatagataatgatagatagataatagataacaaataggtagataatagatagatagatatgcaagaggaggttttcatagaaattggcttacattgttatggttatggagaccaagaagtcctacaatcttctgtctgcaaggggaagaactagaaagccagtggtataattcagttcaagttagaaggcctgagaatcaggggtaggggtgctaatggtgtacatcccaatctgaatccaaaagcctgaaaaaaaaggctgagctctgatgtctaaaggcaggagaaaatggatgggacagctcaaaaagagagagtgcattttcctttcctccagcattttgttctatttaggtccccaaggattgtatggtgcccacccacaccggggagggccgtgttctttactcagttcaccgattcagactccgatctcttccagaaactccctcccaggcacagctggaaatagtgctttaccagctacctgggcatcccttaggccagtcaggtagacacattaaccatcacagatgtcttctctgaccaccttcctatcccatttttctgtacatcacagagagaatgcaatgctttttcttctttgtacttttcacatttacataagtagttagatatttacgtgtttgtttactagtttattgctgtcttcccttccaaattgtaatctccataatagggaccatcagcatttgagcctggcaccaagtggagggcctggcattcaattaacacaggctaaacaaatgaatgaacaaactaaagagcaggcgaatgaaataatgaatgctgtgtgcagttggcctacctcagagtttggggttcaatcccctcagagcctttgtcccttatgtccaacccacaggagccttgtttaaagatataaataccctccaatgtcaaggtgacatcacaaatactcaagcttccatcttgtggtttattaaaaggctggctgaacccttcaatgcacttaattcaccattactttcttgttctttattccctccatatgcattgtgtgagtttgtgtatgcatctttatataaattcttattattcaggttcataaaatatcttttatgagaggaactatacatggctgacccagatgcacacgaggaaatgtttcatttctcaagaagagccttctgtgcatcccgccacccccctgccatgtggcttacccgggagacctaatggttctgaaaattggagcagctgtttggctcataaattactgacctactgtgtgcataacaagtgggacttaaatataaccagctggggctatttttgtcaaaaccagattttgaaatcctgcattcagaaaagcatttggggtgtctttctgatacaattgtgtgtggttgtgtatctatctgtctgtctgcccgtctgtctctttgtgtatgaaaagagaggggcagagaggaacgtgaagggaaactcaagtaagtggatttcatgtgctttattaatcacagacaaaacatattttcttctttagcaaagccaggctagtttatctaacatttgtctaaaaaaaggtcgcagtttatattaaacccaaatgcagggtcaaaaaagcatgaacgtataaaagaccatgtttacaagagaaaaggctgtcaaagactgggcaaggaggactgcttacctctgctgtaaaactaccattagcacattcttccttctatcatttttaatagatattaagtggttttaaccaaatcattatgaatctcaaaagattaatgttttagagtatatgatgatactctttccacagcccttgggaaatctataaacaacaaactgtaaagagtggttactaactttggtggaagcttatggactccttggaaatctaatgaaagctatgaaccctcttcccagaaaaaaaaatacacccacaaatttgcatacaatttctgaggcttcactcaccatttgaaagccatccatgaatcctaggttcagaatcctttctctaaaagaaatataacatgtaatcatgtttaaaggacatggagttcaaagtctttaaagaacctttgaaataatttaatccgtactctcatatacgaggtatggacagaggtttggagaagatatgacttgcctaagtcacataacaaatttgtgacagagttaaaaatctggatgctgttttaaggcagcttctttagaagcaggccccgaaataatcattggtgtgcaaatgatttttaaaagaggtgctctcaagggagacagttaagagtgggagtagaagaacagagcgaaggaggaagtcagacaaggctccctctcaggcaagatctgcaaagaggggtcctgtagagaacagtaggggatggatggtacccatgccaatgggttgggctttcatacttttgcctccttccattactaagcggaaaataaatgccaaggaaccagtagcttgtgggcagccctctcaaacaaacaaacaaacaaacaaacacaacaaaaaaactgcatatggaagttgggagcagaactcagacatggtagaaaatctaatccaaaggcagcaacgtggaaagcagcggatgtgatgggctccagcttccttgacctcatgttgctgcccctagaaggacacacatgtagactttttggtgagcaactcagtgtgctctgtcctaagattaaagatgaatggatgtttaatatttattctacatttttatcttaagcatcatgaggattcccagacatgtaaatgtgagttgtgtacagcatagcacagactagtacaaacaacagccttgtagatcttccttctggaggcttcatgatgcgtggtgtcctcaggatcccattctgctccactctgtaaagccttagtaaactctgtcccaaataatgcacacacaccacaaccttacatatgcctcatacaagggcaaaataggtttgctttgtttctgcagagcttattattttgtaggctagaaactccctttttcatcctgagcaacataactgcattgcaggagagacgtgaacacacatgctccttagtcttaaaaagtctcccctaagccaacataaatgaatttcccttaaattataagacaaagtcccaaagactgaagccacaacattggtgtccctgctctgagtttaaaaacttactggaacagccaggtgaggtggcttatgtctgtaatcccagcactttgggaggctgaggcaggaaaatagcttgagtccaggagttcaacaccagcctgggcaacatagtgagaccctatctctacaaaaaatgttagaaacattagctgagcacagtggcctgtagtcccagctacttaggaggctgaggtaggaggtgtcatggatagtggtcatctgggccaagcgacgcaggaggtaaaggaatttatcaagaaagttgtaggtaaagaaaggcagacttattagagaaggtatgaaaatatgttgcaaggttgcagtgggcagcacagcagggaagaggatgtttgcaaagaggcaggggctagagggacattttatagggttatgctcaaggggagaacatgcagaatgaagagttgcaagatgttttgttccctatggaaactaaagacaacatcttaacatatgtccagaaacccagacccacacctcagagaaaggggagctgaggactgaactgtaatcactgttctttcttccgaatcagaaaatctttgaatccacctatgacctgtggacgtccctgcttcgagatgtcctgcctcttttaggtcaaaccaaggtatagcatttattcatgactttgcctgtgacctctgcctccctgcctttaaaagctcttacctgtaagccatccaggaggtcaggtcttaagcatgagctgcccgattctccttgcttggtgccctgaaataaatgcctcacattctctcgctgcaatcctgatgtcactgttcagctttgcatgcaggagtgtgggcccaagttcagttcaggaacataaccgacagcttccctaatttttgtccaacttaggaccaatcagaaaaagccaaatatgttcccctaaccaatcacatagaatgccttgctgctgttgtaggaaaacccgggttcttgtcacacggccgggaaagattaggcttgaagacactttgaaggatgagggggaatggaatttactgggcgaaaaggaaaaagaaacacacacacacacacacacacacacacacacacacacacacacacacacaaaacaaagagagatgaggttctgctaataggctctccacttcaacgactgaatctcaggttactacccaggaacagggaaggcccagctcctccctgctgcaaactgtgcgaacttcccgaggtcccacccctcctcccagtacgcaggtgggcattactcagaaagaatcagtccggaaaagggcgggatccatcagggacctgcagtccagtttttcagccttcaggctgctttaggcttgaaggcacggtttggcgaggggttgagcagggaagggaaagggggaggagaagggaagccgggagaggggagcgggggcccttgcctgcctcctgtccgtatcactgctagttagccggtttccatgctccctatgctgatgacctccaatcaaggcacatctgaagacttctcttctatcatatggctttccaactcccctacctgcctttgagtatctgcaaatacaagtgatagtggccgactcccttgcaatggcaagctctgaataaatggtctttccttgttctcatttgggtaatacatgtttatttccacacaattcatatagaaaatgcaagtggccaataaacatgaggggaaaaagctcaactgtaactagttttttaaaaaatgagaatgaaatcaacaatgaactttttttgcctgatttggaggggcagtttgcaggtattaagcaaaaggggaaaatgtgcatgcccttaaacctagtaattccaattctagcaattaattttgcagaaattgtctcataaatgaacaaggttaatgtacaaagatgctcactgtctaataatttacacagactaaatgtccaaaggacgaatgaataaaatatgggacatgtacacagtggaattctgtgagactattcaaagaataaaatggctgggatagatagatggtagtgaaaagactcaataatatgcacgtgtgccattttgtcaacatgcgtgtgtgctcgggtacatcccttggttgttttacacaatgcaagagtgggtcatcccagaagtggggctgcacaattggagagagcttttgcttttcacttttcttcattgttcacgtttttatgatgatcatgtactaccttggtaatgaaaaaattaaaatgaaaagaatcagctgggaaatgccgtggttcgcatgaaatgtggtcctgagaagatgttattcactctatcacctattttctcacttctcctggtattgtggttgagttatgcataataggcatgggcattgataacagctttgattcctggaacaatagccgagataatgaggagaccacttcattgacaatgcccagccacgccttgtcagagacaagacaaacatcggtgcaggtgttggaacaatcaagtctcatttatctgctattgtccaagaatgagctcatcgaggctagtgaattttccaaaataatagaagcttatcaatcctttaaagggcctttttattttttagtttaaccattttttagggtaattattcctaaatggatttcacagctcctgccttcttaaagagcgtccagttgatgtggacaggagacaggaaaatactgggtagaagagggcggttccccggcaaaggctccaccctccagcccgaagacctgtggccctaaatgaggacaggcatttctgttttcgcgcccaaaaagttgccttttgggggcccgccgcaccccctgtcctgcacccatataagccctgaaacccaggacccagaagcagaccagcaagccagccgaccagcaaatggaccgcggaatgactcattagggaaagggagaagaggaggaacatctgaaggccgagaggagttgggctgaggtcgctcggagaggagtctgggctgagcagcccaagtccaggggaggatcaccttcccactacatccccacttccggctccacatccatcccactgagggccacctccaccactcaataaaacctcagcaaagctgaaagagcatttaaacattggggttgcaggcaaccaagaccagacactaccacagggccagagcccaaagcgcttgccctggcctctatacctgtggatctgcgtgcttcttctcccacaagggctttgaaccggtgagccacatccctgtctcacgtcctgtgaggggaatcagggaacactcccgtttcacagtggccacataagaacccatccctgatgacttgggattatggtgatgactccggacccctgagctctgacccctttcaggccactgaagtgggtggggaagcttgccggtactttgaatcaccgctgatcactgtgatttttgatatatttatgattggacattgctgctacttctgttactgtcagtcagcctttaaaagtaatctacttatgggaccttaccctggctgagagatctgatacaaaaaaaaagtgaatttatcccaaagctagcttgggggaagggacacaaagcatcctgcctttatatgcaccgctgcaccttgagagcagaaagtgagcagatttatttatttatttatttatttcatttgtttgtttttgagacaaggtctcactctgtcaccaggctggagtgcagtgatgtgatcatagctcactgccacctcgacctcctgggctcagttgatcctcccacctcagcctcctgagaaagggggcacttctgtaaggcaagggaggaaatgagcaaggacagaggtcccctgctagctcagtgtctgatctatcagactgctgagttggagccttcctgggcagaagtaagttgtaaaagtggccaagcgggcatgctttcgataagccctccaagtggatgaaggttccgaggatggaagttccaagacaacaccctggtggtgaaagttccgtgggggcatgctttggtctgcaaaccgactgtcacctctctaggagagatgtgtcttggagcatgtagttggaagaacttgccctgtagggaatgtctgatgaaggtgaagtgaaagagaggggaaaaaataattaaaccacctctagaaaaatgagcgtactcggttacaattcgatgctccagtggggccagaataaagatgtgggtgagccaggttccctggcaggtggctctgggaaacactgtgagaggtctggaaggagaagaaaagggaaagcagcagcccagggagcgctgaccagcagctgtgggcaacagaaacacacaatcccactgtggatatctatgaatctaaaccatttgttctaaaccccttttagaaaagaatcaaattttcctttagagaagaagtggaataagagaaggacatgaagtaaaaatgagctgtgttgtgagaacacataaacagaaccgggtgaaatggttgtgctgagaaggtgacctgggcccccagctgagtggagcagtcagcgctggagagagcagagagagtagggctggcttctatagccaccagcacacttgtaaagccagccatcccagagcaggatacacgtctccttgctatattaggtaattccagggtctggggaataatagcccacgttaaggacaggatagaactagaggtgaccagtacttggacccccttatgccccggttgtcatgccttccccctgaacctcaattccgtcatcaagaaaatgggagataatagcttttagacgcctactatattataggaaatcacatgtaaaattatgtaacagatcaccctctatcctttctaatcaagtgccttttccttcctgacatgagacaataactggtcaagacttcaaaatctgggttataaataagatatctggcataaagagtttctcttttattcttcttatgtatttttctactcttggacacaagtcatagcattgcaatgtcttttatcttttcaatcttactcgtggtttctccaaatatgccaacatgtgcttgcagaatctctcctttgacaacaataatgtggagctgaacactcatgactgcattagtgacttttaattaactccaccttaagtgtgtctgaggacctccctaattttctcgaaagctcctttaacttctcagcagcccggggtttgtcataaccccattagccacgtgggtgtatctgcatgagactctcccatctttacctacctagtgagccactgtgatgaaggggggacatgcttggctggccctacaactcaccatggcagtaagtgatatttagtcaagttgttcttgccatccccttccaaatttcaagctcttaaaaaacatgagaactctcaagtgcttgttgacttgaatgcaataataatgtggcccttggtgagaccacatcagtgccccttacattgacctaaaaggagataaggattttctgtttgtgaggcaacgttcttgatatgagatctgtaaacctgcagtttctgccttatgaaaacatcacgcaagctctgatggcatgtcgtcctcctctggatagatctttgggctttgtgaggcctcccctccttttttttttagatggagtctcactctgtcatccaggctggagtacagtggtgctatctcagctcactacagcctctgcctcctaggtttaagtgattctcctgcctcagcctcccgagtagctgagactacaggtatgtgccaccacacctgcctaatttttatatttttagtagagacagggttttaccacgttggcgaggccagtctcgaactcctaacctcaagtgatccacctgcctaggtctcccaaattgctgggattacaagtgtgagctatcgtgcctggccaaggccattagaactcaatcttggtcccctgagttttctctaaacttcaggatgtcttcccaactcattaccatgctagaaagtgtacaacactgtcaaatagagttgcatctggcaaaggggtaattatagttttcctttctcatcctggcatcacttaccaagtgatcattgtcttagcaactttgagtgaaggcatttatccaagtgtcttgttttggtttcctccaaaagagaaccctgagatgagaacctggaagtcagtaatttatttgggaagtgattccaggaagtactgtgtggaagcaaggaagtgaggaaagggaaagaatcagtacagggtgctctgggaagactaattctgtgagcaactggagtccaatcccgctgagacctctgggaagccatctcaaaaacacactttagagttgtcccacatgaggatgctgtggcactcattcgtcaacctccatctattattggttgagggatgcttctcagagcataaactttccggcacttccagcctgaccaccttgtaggtgaagaatgtccaaagaccagagaaagtcccctggaagacagagactcaggtgtttgaggtagaaaataatcagcctaaacaagaagagttcattcaaggaataggtgacatttggggtgggacagtaggatgtgggccgagcattaacatcatctgctacacaaaccaacagtggatatcaagataaaccattcactttgactcttatataatccttctgataactaaatgatttgtttgtgaaagatttgatgagtcaatgagtagtcttagaccatggaaatagcagcagatgttagcctcagaacagaaagcctagaaaaactaggacatagtccaaaattgagaggaatgagaaaccagtcttaaagttggaaaacctcattaatcaaagaccaaagtaaaagagtcctatgcaaagctggaagtgaaggtgtaaccagcactgaagggtcaggacaatactggggcagaaccatgcaggcagataagaaaaatggtgagctactttttaaatttctattactctctgtcttttcccctggaaagagaaaacattcttgaaaaataaggagggctttgcatgtttgtttcaagagcagcacttagtggtgggagaagtactcctcttcattctcagcagctctgcaggggaggacccaggcaaaataaaagaagggagaaaccacattcgtgaggcctgagaaaagacacaaagatggaaaaggaaaattggcctatcattgagggtggtattcctggaaacaagtttccagggaagacggagaaaatggggtcactggcacagagggagaaattaacagtgacaagtctgcactagaaatccaagcctgcttctctctcttttccttgtcattgccttacaacacaactcctgatgaacacaaggtgccaattggccacatttataccacatggtctgccatcacagatacagatgactggcataaaatgaatcattctattggctggaatgactcaatcagattttctctcacagaaatttgaactaagagatccaggaagtctagtttgggaaggtctagcataaggactgtaaggtcatttagctctgctagcagtaacatacaacagggacatgcacagatgtagaggcaagggtgacatcagagaaaatggctaggtaaggatctctgaaagttcaggcttctatgaaagcaatgaaaaaattggcaaaatttggcagaattgactttttcagaacttggaaactaaccaaaagcttgtagcatccctgtgaggatttaaaaatatgactgaatcttgataagaacagattgtggcattttaacttactctagtcccatcctccacttctcagcttagtggtagccttgaaaaatcagtctgtattcctggtaccagagggagcaaaatggactttgtttccaaataagtgtcttattttactggtagttctctggaagtccctcattcagaaggcttctttatttgacttcatttgaacttatccagtgattaaaacctttgaaaggaaaaaggaggaggatggcatttgtcaaatgttttaacatcacagctgactggggtgatggataacagttagggcaaacaatggaataatcaaaaaatctaaaagacaaacctgaggcatgagatgtccataggggctttgaaaagtttcaacatgttactgggaatctaaaaggccacatgcatgcccagggctgggtgcaggtctgagcattctcaagaaagacctgagaaggctctaagtgctcacctctggctgtccttgaggttctacacaaataggaagtgaagactaaggtagagttgctgagagatgaaggcatgtatcaatacacatacagaggccccaggcaaaaacttggagatttattagctccagatatttaaggcaatctctgcgaatcattaacctaccactaagctaactgtgtggagacttcagtggccactcatgactaagatacagacttcacatattcagaaaagttattaaacaaacaaacaacaactacaataatcagcaaacatccctgaggaggaaggagaatttgattttcagtttctatattatatatttgaaatgtctagtttttgacaacaaacatgagtcacacaaagagacaagaagtatgacctatacataggaaaaaacatcagtagaaactgccccagaggcagcacaaacacttggtttatgggacttaagacaaatatctaaatcagctattttaaatatgttcaaagagccaaaatatggggatgatatctcaacaaacagaaagtatcaacaaaaatatagaaatcacaaaagaaaccaaatagaaattcttgagttaaaatgtaccatgattgaaataataaatttacaagacagacttaatggcatatttgagcaggctaaagaaggaatcagtgaatctcaggataggttgagattttctagtctgagaagcagaaataaaaaagaatgaagaaaaatgaacagagccttagagacctttgggataccaccaagcatacaaatatacacataatagaagccccagaaggagtggagagagaaaagggagaaatgttgataattgaaaaaataatggtgaaaacttatgaaatttgatgaagaactttaatctacatatccaaagagcctaataaactccaagcaagataaactcaaagatatgacatctggatacataagaatcaaactgtcagaagccaaaagcaaagagaagctcttgaaattagcaagacagaagcaactcatcaagtacaaagaatcctcaataatattatcagctgatttctcattaaaaagtcatggagggcagaaggctgtgggaagatataatcaaagtgctcacagaaaaaaaatgtcaactaagaattctatatctggcacattatctttcaaaaatgaaggagaaattaagacattctaagataaacaaaacagagagttcgttgctagcacacctgtcttacgtgaaatactagcaggagtccttaagactgcaacaaaaggtctctaggcaacagctaaaattcatatgaagaaaataaagagcactagcaaagggaattatataggtaactctaaaagagtatgtactgtatttttgtttgtaactttttttctaccttatttaaaagacaacttcataatgcaataattatacacttaagttgatggacacacatgtgtaaagatatatttatgacaataacagcctaaagggggtaagatggagctacataggaacaaagtttttgtatactattgaaattaagttgctattaatccaaattagattgatgtaaattaagatgttagtggtaattcacagcgtaagcaataagaaaataactcagaagtatatagtaaaagaaacaagggaattaaaatggtacactagaaaatatctatttaacacaaaggaagggagttatagaggaattgaacaacaacaaaaaacaaaaccatataaaacaaatggaaaacaaatagcaaattggcagatgtaaatcctatcatagcagtgaggattaaatgtaaatagattaatctccccaatcaaaagttagagatggatagaatgtattaaaaaacaaacttaacccaagtatattgtattgtctacaagagacatgctttatcttcaaaaacacaaaaaggttggaagtaaaagatagggagaatggaaaaatatgtgccatgcaagactgaaagcttagtctctaagatcaagaataagacaaggatgtccacgttcactacttctattcaacgttgtactggagggtctagccagggcaattaggcaacaaaaatacataaaagtcttccatattggaaaggaagaagtaaaactatagttgaacatgacataatcttatatatagaaaaccctgaagaatccacacacacaaaattaatagctaataaatgagttcagcaaggttgcagaatatatgataaaaatacaaaaatcagttatatttctatacattaacaatgaataatccaaaaatgaaattaagacaatttaatttaaaatagcactgacatgaataaaatatttaggaataaatttaaccgaagaaatgcaagactttttcactgaaaaccgtaaaacattgtttgaaaaaagttaaagaagacctaaataaatagtaagacatcccatgttcatagactggaagatttaatattggtaagatgaacaattgttcagatgacaatactcccccttgatctattgattaaacgcaatctctaccaaaatttcaaatgccacttttacagaaatggatgagctcattctaaaattcatatgaaatggcaagggacccagaacagccaaaataatcatgaaaaagaacaacattgtaggactcatacatcctgattttaaaacttactacaaacctacagtaatcaagataatgtggtactggtataggatagacatgtagatcaatgaaatagaattgagagcccagaaataaagccgtacatctatgatcaattgctttccagcaagattaccatgacaagtcaatgggggaaagaatagtcttcaacaaatttttctgggacaattggatagccacatgtaaaagaatgaagctgggcccctaccttttctcatatacagaaatggatcagagataaaaatgtaagtgctaaacctacaaaactgttcaaataaatcatagatgtaaattttattactttgccttagatagtggtttcttatatgtgataccaaaaacacgtgcaatgaaagaaaaaacaaatttgacttcatcaaaatttaaaaatttttgtgtcaaaggctatcaagaaagtgaagagccaacccacagaacaggaaaaaatatttgctaataacacaactgataggcatctaaaattaaaaatataaagaaccatgcactagcttataaataactccactcatccttaggtctaggttcaagaactaaatccacaaggaaatcttcccccaccttccatcatgggttaggttcccctctctcacacatactaccccattataagctctctggaaattcttccctttctttatggcacttataatttaaaatttacatgtatttaatctttgtttaacatctaagtagagctgaactaacatagaaataaccactgttaacatttatttatttatgaataaatatgtggatgaatttaaatgaataaatctgtataaaatttaggttgtgttatatttctgtgatcttttatgctttttaaacttttatgtcaataatatttttgaatgaattttgaaactttgtgggtaagacggttgtttcttaatacttgccagtttctgtatgacctggctacactacttgtccttttttttcaatatcccacccttgttttttgactgagctagtttgagttggatgcttttcttccagccaatcatctatgatttgcaattcctctgagtcagaaagtaaacaagaagtgcatggccgaggaagtacctgcgatactgaggtggagaggtgagaagtcagggctctcggaccttggtcctaattttcttcatcaaggaagacatgacacatctactgagaatgaataaaggactctaagggacatgaaaaagctttggaaaaatccttttccagaaagggattcgaaatgttcatctccctgggagatgagaaagatctggacgtctgttgtaatttactcaccactcagtgagcaaatgtccatcgaagccccctaaattgttgttaatggtgttgagatcctagtgttctagtatactcaccattggaaacttctggggcttagaaagttctttcttataatcagttatatgtgcctctcccaatacactggtgcacttacattcttctgaggacaccacagaataagctatagaggaaaggatttgcctggttgaaggaagtcatcaggaatagtttcctcaagctgcaggtgacttttgattgggccagtgggatatggatggagcactgacagcatctgctacacaaaccaagagtcaacattgaggtagagccattcattttcctcccagagtgatccttcttaatgggtggaagtgggtgaaggtgcctcagaatcacatgggggctcttacacagttcatgttctggaatccaccttcatgtccagaggacattggaattagaggggggagagcctcagacagcagcttctgatgtgcccttctgggtgagatggactggtgtgaaatgctaaggcataaacaggagcagctgacttggcagtcccaggcaccaactgctggtggtaatggaacatccacatcttccaaaggcctgctgaacttctgacccaaactgcctgatgccaacattttgttcaaaaccttgagactagttaaatctttgccactcattcatggtatcctcagccaaaatacagttcctcaggatgcccatcttccatccccaatgccttgtgcttcctaaccccacgttcacctcccactgaaaaccctcctgtcatcaatttattctagaccccttgagtgtccattaaattaaaaggactttcctatatgctcaacgtcttccagagaaacttctcctctacctcaggcctttacaggtaagttagtgctttctgcaaagctttgtcatgtggaggctgtgggttctccctacactcacctgctgtgacctgggcagtggcctgggctttagccagttccctgctgcttcttccagatggcctcattttcacccttatgcaaaactcttcagcagatgttactattgtttccctaagaaacataagagaatcacttgagaaactataacaaacaatacaaaaattcagcaaaggagtgggatgcaaaatcagtaaatagaaaccaacaactttcataaatacagttaacaaccaaaccaaagacctaagaggaggcctgttgtaaaaatatcagtaaagatgaggcccttacacagaagtgtgcactgcctgtacgaaggaaactaatatcgttgtagggtaaagaaaagacttaacaagtggaaagacagaccatgtaattggacagaaaatgacagcatcataaagatgtcatttctgttgaattaatttagaaatttaaaacaaagccaatataaataccaaggtttttaaaactggattatctaattaattcttaagtttatatggaaatacaattttaaagtagtgaggaagaatcttaaaaagaactgtattagtggaggattagagcattatggaggttaagataccaaacatcttatgaagcccaataattaaaatagtgtggcactggcacattaatagatagatgaatggaacagaatagaaaatccaataatagacccacaaatagacaagaaagtagtgtagaaggggcatttcaaacctgtagatggactatccaatagttgagacaactgagaagccacctgaagataaagcttgatctattccttgccctgcatacaacagaatcaattccaactgggtcaaagatttaaatattttaaaaacttaatctaaaatcactagaaaaagacacaagaggatttctttataaccttggaggagatgagagttttctaattgtgactcaaaatctaaatgctataaagaaaaagactgaaatgaaaatgatgaaaaacaacttcaggacaaagtaagcaaagtcaaaaaagaaaaaaatatttgtagctcatctctgggcttagactttaaaaagtaatggagaaaatgtaaataatggagattaaacttaaaaatgtattgtgtctgtgaattacattacattgtgaatagcataacaaattgagtaggtattcttccatcattagagaaccagtatctgattcagcaaagaagtcactgaagtcattgatacatgagtaaagctccaatatacttctccattgtttcacttctgtcttaatttaagcaaaaatatcaacactctttcatctattgcaaccatagcttggctacagatcaaagactagcaaaaatcattgaaagcaccctatgaaaatcaattggctatatggaatttacaataaagaacattttatattttattgttacttaaaaattgtgtgtgataattctttatactagcaaaatttataataaactatgtatacacaaatgcatactttattttagagacctggttgttaaatattggccagaccaccactgttttaaaacaatgaaaagtcagcaagaagaaattttctgaaataggtgtgcatgtatgattaaaatatcttaaattactacaaccaatgttttccaaatcagacatgacaaactaattagattgaattgtttcattaatttaataaatttaatttaaaaaattttaaattaaattctaaaaatacatagctttaacaggaaaaatatggaattgctatatctttaggctttagtaaatgttataatttatgagagctgtaaggcatagagggagggagaattgacgacagtaccaatggcattggggtctcgcattaaaccctaagccatagagtaagctgggacagctgagaggagcaggctgcagtttttaatgagcacgtatgagacaccccctgggaaactccagaattaactaaccttggcacagagcattgcaattaaagagatgggggctaatgagtgctaatttgttgctaatgtcagtatgacctcatttggtacctacagccctgtgagacctaggggcatccatgttataactaattaagaattgagggtgatgttttacatcataaataccaaaacagcttggcaatgcataccagtaagagggtgagactatgtgttcagagggatgaaaccaatttacatatccatagaccagtgctgtcagtgacgggttatgggacaagcaacgtgctgatatatgaattcaaaggcatggatgttactcctgactctgtatgttaccagccttgtgatggtgcagtggttgagcttttgatttgctcttcagtaaaacaggtgcacatggtatatcctcttggtgcctccactgtattagtccattttcatactgccatgaagaaatacccgagatttggtaatttataaagaaaaagaggtttaatggggtcacagttccatatggctggggaggcctcacagtcatgccagatggtaaaggaggagcaaaggcatatcttacatggcagcaggcaagagagcgggtgcaggggaactgccctttataaaactatcagatcttatgagacttattatctatcatgagaacagcatgggaaaatcccaaccccatgattcaattacctcccattgggtccctcccgagacacatgaggattatggaagctacaattcaagatgagatttgggtggggacacagtcaaaccatatcacccaccccggtccttggtatggaccagtgcctgccctccatgctgttggaagtatggctgcccactgctcacagctacccacgccctctggagaattgccctcagctaatagatctgttgcacttgagaagttacagcccccctcctcccaccacaggcagcccccagctaatgactgactgccttggaggaagagaaagctggacctcttgctccaagaagggccactctgcaatgtagtgagtgctctgaagcccccatccctgtcccatggatcaggccccagctgggctttttctgagaccacctccttgcttggctccttcccttgccctgtcctgcttcacccccttccttactgagaactgtccctcaacattttacacacaccaaaatccctgcctcaggctctgcttctcaaggacctaacctaaaagagagttgtaattcctggtctgcctattttataggattgccattgtctgacactaacttgaaagactggattggacttaggcctgctgtgagctgtggggacctttgcaaggtccagggagctgggctaagccaggcgaaatattacaaagggcagtccaactcagtggcatcccaggatagtgagcagacacgtcagctacagatcagctaagcccacaaaagcccaaggttatccagaacccacctcaagggcagcaaaaactctaagagcagtagctgaggctgagacatgcatgaggcaggcctggtccctgggcaggctgggccaaaccatttaaaagagcaattgcagtggagtccagtaagtctacacaaaaacaatctgaaaaccaaaagggtgcacaaatgaaagttcattttcacaaataaaaaaggcattatcatttatgtgaagtaaaggggatcttatggatgacatgtgctctagattacattccaccattctgaaatcaggacaatgaacccttctttgactccttccagatctaagctacaggactctacgtgggtagaattgcaacctagaaagctgctttgggaaacctaagttcctttgggtggcattgaaaataaaccaagatatattaaacacacagaatgtagctaaagcttttagctggtatattagaaaaaaaaagaagagctgaaattctgtgatttagctattatctctgaagccaaaaaagaatcacaaagtagaggaaaagacaacagcaaaaatccatgaaatgggaaataaatgcatagtagagaaaatccataaagccaaaacctggctactggaaaactaataaaattaataaactaagcaagaccgatcaagaaaaagagaagaaaaatgcatttccaccatcagggagttagactcgctgtatgtgaaatgctcttggaagcaggtggaggttgaggggagctgccatcgagatgcatttcaggtacctccatggttaagagcccagtgttgggcagattataaattcagcctcctggcgtgtgcagactttctgccttacagcccatatatcatgctaggatcagctttttatataaaaaaaaatatatatgtattccaaagttaggattaaagactagcaaaataaagactaagactgaaaacaaaattgggcttccttaggttgggttccccagaagacaaggactctagtttatttgagaagtggcctgaggaagcatgggtgggggtggggaagtggccattgctgtcctctgatggccaccacacccctcccctcccaggtgagcacgctgctcctgcctcgctgcagcctgcatccctctcacaggtctaaccagctctgtaactgttctgaccaatggcatgtggcagagacgtcattctggcacttctgagttcagggcacaagagggctagcagcttttctttctctctgctgggaaatctcaccgccgcatgggaaggaagatcaggatgaccacagacaatgaaacagcatgggaaagagagccacatgcagcagcattgaagggccaggagtgaatggaaactgcctggaccttccggcccagccctgcggccagctgaacacagctgagtgatgaccccagtaaatggcatgtggagcagcagatccccctggctgagtctgacctgagctcctgacccacagaatcaagacaaataatacataattgttgtaagccctgtcatttgggggtagtcatctattacagcaatagatgactaagtcaatgccaggccattcttgaccaggtcactgcttgggcagctgggctcagtcacactgggcttctgggagatggtgtccaacacgccttgagatgtctcacttggggatgaagctggggcattctctcactaacacctattgtcctgggtggagggctgctcattggggtattaaatgtgagccagagcagaccctgttcctacagccagtgggaggcaagtgcttgctggaggaaattgtcccatgcacaggaattatacgggttcagtggccctgagcagggtggcaggtggcacaggcaacaagatccaggccctgtgtgctactcctgacttgcttctgctactcacacccaacccatcctcattgcaccaactcgatcagactcaagttcttcacctgtccctgccttctggaatgatgttgcacttttcttgggatgctccttcccctttcattattctaactcctattttaccatcaaaggtcagtgcaaacacttcctcttggaagttttcagtatcagttaaatatctttcagttacaaattaaaaaaaaaaacagctactcaactcaaataagcttcagcaaaagagaaattattaatttgtttaactgcaaagtctcaaagtaggacaggcttcgggctcagtttgaccaaggctcagttgatgtcaccagaaaacattgtctctcttggcctctggattcagccctgtccatctctgtgtggtgactacattgtcaggctccaaatagtggtgggatggctgctactgctctaattcataatcttctcaatttcaaagaagaggctttaaaacaattcctgcagttttctagcattagtttaggttacatgctcatctctgaacaagtccaagaagctggaggaagaagtatgctggttgtctttagcctggttcatatcctgtagtcctagggccaaaggctggggcctcacctggaccaatgggtgatggattggtccacaaataaaactcaggggttgttgcctaaatagggtgacaggatgctaagggacgtgaggcagcaaatgtcctctactcctttcctgaacatctcacctactttcctcctgccctggtttaatttaaatgccctttttctgtgactctggcatttgccatactgtattataacagttgctttatgtgattttctccaccaatgtcctgtaaaactttgtggacagaggccatgattgacagaggtcatgattgatgtgcttttatatcttcatacatactcatccgcaccagcattgcaaattaattaggtcccccaaaatgcttgtggaatgaacaaacaaatcaatcaatgatcagccataaataattatgtaaacactttcattagaacaagcacagtcatgtaagaacaaaggcaagactctaactgatagatgtttacttttgtttgtttgcaaattttattaaaatataaatacacaacaagtacataaattataatcaatggaagaatgttcataatctggacacagttacataaccagaaccaagatgaagagacaacattaccagaattccaaaagctcttgtttactacctacctctaaagacaaccactatcctgacttgttagttttacttgtttgtttgtttgtttgttttgtctgattgtttgtttgtttgtttgtttgagatggagtctcgctctgtcacccaggctggagtgcaatggcgcgatctgggctcactgcaaactctgccatctgggttcaagcgattctcccgcctcagcctcccgagtacctgggattacaggtgcccactaccacacctggctgttttttgtactttcggtagagatgggatttcgccatgttggccaggttggtctccaactcctgacctcaggtgatctgcccacctcagcctcccaaagggctgggattaccactcctggccagttttgcttgtttttgtagcttgtttgttctcattgctacatagtgttctattacgggattatgccacaatttatgtacccattctactgttgatggactttcaggtggtttccagtttggggctactacaaataatgctgcagtgaacagtcacaagtgtcttgttagtgaacatatggacatgtttctgttgagtatatacctacaagtagaattgctgttgtaaggtagggatgtattcagctttagaagacactttcagttttccaaaatgggggtaccaatttacgcttcagctagaaatgtagacacttgattgattgaattttgcagttttcatctgcataacccatgaacacatttttcatgtattcacagagctatgtacacaatagatgattgataaatactatatggatgaatgaaggaatgaatgaatgaagtaccacactgaagaatgctgaagagccacagaatttgatgaaagcaaactttccccttccttgactacaatgtgaattaaacgaaagactttgtggaggatttcattcataatcccttcaaaatgagttagtcctgctatgtactgaatggattatgcatgaatcccaaaacaaatccaactgcaattaatgttttaataaactggttgctagtgtatgcaatacccacaactcgtcaggagggattttattatatttgtaaacattaattagttgtttgttattgtcaaactaaatttaaaataaatccacagcatcgctggccacttgggtgaaaatatctcagtggtgactgtaattagaaaatagatgtgagagaatagccttaattagttagctaatggcgagctttccactaattgaaacgaggagtctctatctcacagggtgatacaataaatatcttaggtgtgagcgtgagtaagaagtgaactcctgtgggtattagtaacaagcccaaatgttcttttaaccctttccttgtggtatttccataagaatccacatgcttgttgccaaataaaatacaaaataaagaggaggtttttggcaggatgaaactgattctgtcctagccaaaatagggaatggcctccctaatgccagattcaattttagtccttgtctctctgaactcctctggggcaggtgaccccctattttcctgcttcttctgcttctgtggacactcattctcagttttcttcattgtctcttctttctcctaatgcttacgcattagtgttctctaacgttctagtcttctcatcttttttatcttgcactctctcccatgatggtctcattcactgctgtggtcttaacctccacccatgtgcaggatcctggatctgtgtcttctttcctgccctctctcaggcttcagactcaggtgtcccatcatctgctcatattccctactgtatttcttaagggactttgtagcagatgctgtttgcagttccgtccaaatgttccggggtcccgtgtgtcatgtctgtgttctccttctccagcttctctgcggctttgcttctacctgcctgcacctgtcactctcttgggtgaatgaacctgggctctccacataatacagagagccagaagggccagagttcccctcttgggtcaggctgagggtgggactttacccgagagctcatccctgctgggcttattcccttccctgtcccgcttcctccatgtccttattagtctcccctgggagcacttccttaataagtcgcctgtacacaaacctcatcttaagttccatttctactaacctggcccaacatatataccaagcaaaatacatcatctccccacaaaatgaaaaaaaatatagttccttcttttatatttcagctctccactggtatcactattgcctaaggcagaaaagaagaagttctccccttccccatttacctgctactttcagccacatggaaatgctccccagatcctgacaatacaacccctccctatcctcaccatcccctccttatccccaccatcccctccctatccccaccatcccctccctatccccaccatcccctccctatccccaccatcccctccctatccccaccatcccctccctatccccaccatgccctctctatccccatcatcccctctctatccccaccatcccctctctatcctcaccaccccctctctatccattgatccttccactccatctgttgcagagacatctacccgccctccaaacttcaaactttcccattcatagtttggggttgctgccaggaagcagcagccagtcaagactacatttccaagctgatgaccttgcaactgagcaggccacatgcccagttctcacctatgacaatggaagtgacgtgtgtgtcttcctggtcaaggttgtcaagaagtgggtggggctcttccactctctctttctcccttctgcctagatgtacaggacttgaggtccccaaggctgtgaaattgcaagaaagaaaggatctggggctgctgagctacccgtgggtgaagccctcccatgaccagaagcacactcccattggacaaggacagaagcctttgtgatgctaaagccactgaaatttgagggtgtgtttgtgtggctgcgggggtgccctggattactacaccacctctgctgccattacttatttaggatcgtccctgcctggattcctgcattcgctcctgacatagtctccatcctcctcacccgtcacagatctgtcttttacctattcaccagaacagagcaacctaatggaaatgcaaatctgaccttgtacctctctgttcttcaagagtcttgaacacctcccatgccctgttaagtactggataaaggtgaagtttcccagcaccttaagagacctgcatgcctaacagttctctctcagccactctcagccttgtaatttataccctaggagtgcctgactacttacagctccctgaaagcatctgctgtcttaccaacacctggacagtcctacctcgaatttgccggctgattggttcctgctgatttttgaagatttaacttggacaagaagccatcttaacatttccccaggctgcagtagagccctcactgggagtttcttccagtgcaccaagaggcctagactcagccactccccagtccctcttcccaaccagaccaacctgcacacttgttgaaagtagggatccaggctttacattccagaaccgactctctgtccatattactaatcaaaagtatgagagaccaacttttcaaaattatttccaagttctgagataattttcaagttcaacaaatatggagggcacgcgtagcaggaaaagttgctgtgttttgtcatttccttggcattgctagagatgggttgaagaatagtctggcagtaataggggagagacaatattagagtggtgatggagtggacaaggaagcaagagagaggtgacatctagggagagacgggaaaaccacagtgtgggggtaggactgtggacctcaggtttgaaatccttagacccagaaggaaatgttctgggtccgttggttcaagtgccaattgcgggttcagaacacggagctctggactgatgagctccttgtccaagtgcatcctgcccaccagtgaccagtctaaaataaaggcctggtcacgaacactctggcctctctcagttttactctctgctgccttcaggagctaagcttttgccagatgaagctggaaacttccatccattagtaacaacttctcttccccggaactctagcaactcaactggaaacatgcaccagggaagagagtaggtctggaagaaggactgttctttattaggcccacactgaaattaaaaaagttttattcacatctctcattctggctttgacagatttcatgagaaatccctctatctgtgggtcttaccgaaagaagcatttaaagaaaaatatgtccgttaaaaaagcaaataactagtgctgctgtgttagcatggtttgctgttgtcgggggagatggtggcttagtgagatgtagcaggttaggacatttctataggggcctctaaatcacttaatggtgaaagggattcccagatggccttatcagcatctatgtaaaattgttagatatctgcaccaactaataaatttgacttggagcttggttttctgacatttcctcaaatcctcagagaaccgtagttactgtatatccttgtacagtatttgaattcagaattgctatgcctggttggttgcccaccaggacaggaaataaaactccataatacaatgtcatttttttaagtctgagcattattagttgccgtgatattgtatgacaaactcatgtttcttttttttttttttgtctcaaatgttttattctccagtacaactcatttgcattgttgtcccatatggggatttgtacaccgtggtacacgataaagatgcagaagggaattaggtcatcaggcatgctcctttttcttttaataaccccatccaacctcctgcttcttaatctcatgcagacaaaagcaatagaagctaagccttccagagccgtgataggaaaggcggacgcgcaaatccaccaacatacatcctttcactcgcagtggatgtatttaattaatcccatgtggactggtcttattcaaataaaactatattttataaactgctgccttgttttctggtctgtgtggtgacccctgattgaggcagctgtgccgttttaagcagtcagttattaagggtctgggtttctttctgctaatggcgtcatgcggaaaagaatctgtattctacgcagggtaaaaacatccccagtgggtaaggaattaggagaacattggaggggtatgaagcggtggcagcaggcagaggaggggagggtgagcaggagggaaggtgggaggcagcgaggtcccagctgtgaccctggacaggcgatgagcttggagattggatggcttccgcaggctggcgcccacgtgggccagtcctcctcatgccaggcggggttctgagcagcagtttgctactgagggtctttccaaacctctgactacatgccatttagtacccaggacaaccccacgttactgaagtagaggtcaagttgctggcataatgacaatattagaaaactctccactagctcttaacatgtgtcaaacattcttctggcattggctcattcaattctcactaaaactctatgaggtagctattattattatcatccccattacagactaggaaactgaggtattagttaaaatgttcaggagcacttggatagcaatactcaaaatgaaccagtctgacccaaagactatgttcttaaccattacacagcccagtctccgaggggcattggttttaccccagccaggacttgaacatttaggacattcccttcggaaatgcgtcctaggttcaccaaaggacatgacctagactattcataaaagcagtattatttcataatagcatcaaactggaaaccacccacatgcccaccaatagaatgaagaaatcatggcatagtcacaaaacagaagactctacagtgatgagagtaaaggactcacagctactcacggccacatgaatgaatctcacaaacatgaaaggtgttggacacaaaagaacacataatgaatgtttccacttaaagttcaaaaacggccaagctgtctatggggagaaatcaggagagtggttacccttggtgtggggttaatggctagaaagggcacaagatggggttttggggatggtcatgttttatgtcttgatctgaatggtgattacatgggagggttcattttgcacaaattcatcagaattgatacagggatatatgtttctatatgtatgtcatgcttaataaaaagggcaaagattaaaaaaaaaaaaagacatggccaaagaaagagtccagtaaaagcctcagaattgatagtcaaaacaccatttgtcaatgatacatccagttcctcaccaggaactgacttcaggccaagggggaaaacacatggagagcttactagggtgcaaaaagctcaggaggagagttcccttgtttataacctgaaagcctcattccacactccgctgagccactaactgactgtgtggccttcattgagtaaggtcacctggatgaacataatctatgcattttttaatctgttaaaagtagtaagaataatgaactacacaggtgttttagtggctctaacaaggtcagctccctgggcaagaagcttagacagcgatccatttgaaagctcatccagaggagaaatactctttggacaaaacattacaattccttcagggaaggtttgccattatcagctcgcattgagacccttcctactacctgctatgccctggctttctccttttgttttatttatattttttatattttccttccagtagatttatttcatttttcctaccaggtttttagaacaccgtctctccagcctcctgacatttctatacctagaaatggaagacaactcatcttttgtggaagacacctggtttttcttgatgcgaagagtcatagcttgggtattttatttggaagcacttccatttctcagaggatctgcttgtgagtgtcagatacccacagctagggcagaagaaacacgtcagaagcaaacatctgccagtgacacctctcaaacctctctggagctcaaatattttggcaaacttcagcctgattttaggtggggtctcaagcaggtggttgatgggatgtgatgaggaaagaaaagacctgttagtcttgggaaatgcaaagtttgtttgatttgagttttcagaatttgtttatttttctcatcaaaatcctcattaaaagagtaagggggaaaaactcccttttgcttttatggtaggtgacgtattctgcaaatcccaggacaatcagtctcagccaagcccttaagaaagccaactggaggctcctttctgcttcagctttctaaatgttctgaaattataaagctggatttttcctgctgtttctgtttgggaaggcacttttttaaaatttaaatttaaattttttatttccataggcttttggggaacaggtggtgtttgtttccatgagtaagtcctttagtgatgagttatgagattttggtgcacccatcacctgagcagtatacactgaacccgatttgcagcctctatccctcaccccctacaaaggaactttttaagagaagacaagggtttataacatcttccggggaaaaaaatccaccagattattccgagagactttgtagtgaactggagtataatgtttgtgtgaagagttgaattttgaattttcaaagcaggtatatttcttaacatgctttgtgattgttttgtgaaagatttgaagttagaagatattattaacttgtattctttattttatcactttccagcatgttttaagtaatataaaagatgctttatggagatgtgtgtgtgtgtgtgtgtgttcaaaagtagtgtaaagaaattccactcacttttttggggtgaacttttaattggtttaacaaatatggagaaaaatgcataatttaaaggtttacagcccagtgaattttcacagagtgaacacacccacgtactcagcacctagtcccaccaaaccttctccacgccccagcaacaccatccccaaccaagaaaaatcattactctgatctctagcaccatagagtgtagttgtgcctgttttgaaatgtatatgaatggaattacagattatccgctctttggtgtttagcttccttggctccacattgcgcgggcaagatccgtgcctgttgctgccttagcgatagtttcttcatgcttagggttgtctcagagaccgttctgtggatgttccctaaattgctcactcattctcctaatgatggacccagctgagttaagtttggagtcattatgaagaaggcttttctgaacattttggtacatgttttttggtggacagagatattcgtttctcttgggtgtatacccaggagtggaatttgaggttatagggtatgtctttgttcagtttagtaggtattgccaaacagcttcccaaagggttgtatcaaccaagactcccatcataattcacctgcaattttgcatacaccgcaatactctaacatctcttttcatgcatggtgttgctttttcttcctgcctacctatttgcaattttctaactcatcaccacccactgtccttcccagacccagacttagcctgttgagcactgaacagcatcgaagttcaaggtttgctgattacttcattgtttatttgcctgttaaggaaggaggcaaggaaggttaaaagcagtttaggaattatgtatcgtttcctctaactacagtctcatgatactccatcctcacaggccagttagaaagtcagacatattgaatgctggtagagatggtttgagtactcagagagtgcaaaaaacaaacaaacaaacaaacaaacaaatactacgtattcttttcttcttaaggatcaacagtgtattcttttcttcttaaggatcaactcatggtttatatgaattaaatttttggcagtagaatcaaattaatttctaatagaactgggtggatttcatcactatccaggcttccttgcataatatttgatgagggtggatataatcgaaataaagcaaatcccagcagtaaatactggtgactctgagctgtcctctatggaagtagaactatctcttcaggctggtgggcattcaattctacactttccctctgatttttcatggaaggggggtttactcttaaatacataatggataaaaatgaagatggagagtggatggagattggatggagaagtaggcagaggaaatagtcttacatccccggatcaggaaagaataagggcccagaaaagtggaaggaagctatagcactgggggactcagaggaccccaaactctctcccactatgaagtttccttgactactcaaaaacgacatttcttcctagtctgatgaccccactcaccccgtgactaaagaccgtggacagccacgattttggggctgactgctcatgtccagcacccccttccctttgttcgtgaagctcacgtggaagcagagccttacaatgaccccagacgtcagggctggaccaactgcccgtattagatttttagggcagccaataactaaataccacagggtagcttaaaacaacaggaatgtattctctcacatttctggaggccagaagtctaaaatcacagaggcaacaggccatgcttcccccaagattctgggaggatccttcctggccccttcctggctctggtggccggcagtccctggtgttgcttggtgtgtagaggcatcgccacgatttttgccttgttgtcccatgacggccttctctctgcgggtctcagtcctcacatggcattctcttcttcttataagaacaccagttatgctggactagggcccaccctaatgatctcatcttaactcagttacctctgcagagaccctattcctactaaggtcacattcgcaggttctgaggggtaggacttcagcgtatcttttgtggggacacaattcaacccagaataccctttgtgttgggtcaagttctctagaagtagagcctgaggtgagattcttgttcaagcaatggattaaagatgtaccttccagagaaggagggtgagagaatcaggggagggcaggggcaaagggaagcaaggatgtggtctcagaggaaggttagcctcagcctggctccacagggtctctgaagaatgaattctgccatacagtcagtccatttttaggcctgtgagccagcttcctacacactcatgtcactctgtcgttggctaggagcctccatgggtgtcatctcccaagcacggcggtcccatctgctgaggacagttatctggagaaaaggaagacattctctgctgtgagaagacaattctcaccgcagctgggcatctgtgtggggcatggatgtcagccccagcacttccagcagctggtttgcagagggggccacagacgtgcctgctgccttcccgcccctccccctccactgcccatcgtctcttaagtttatacattgaatgattaaatgttacttttggataaatcagattattgccaacttcccacttaataaatacagagcagtaagcaatattttacattaagcattaagtttatacagttgatccttgaacaacgtgaacttgaactgcatcggtccacttatatgcagattttcttctgtttctgccgctcctgagacaccccccacttcctcattttcagcttattcaatgtgaagacattgcacaaggatgaagatcttagtgatgatccacttccacttcatgaataataaatatattttctcttccttatgattttcttttctttttaagaagtgcagtgatgcaattatggctcactgtagcctcaaacttctgatcaagggatcctccagcctcagcctcccaaagtgctgggattacacctgcacccatcgccttatgattttctctttctttctttctttctttctttctttctttctttctttctttctttctttctttctttccttccttctttctctctttctctctttctttctttttatttctttccttccttctttttctttctttcttttttctttctttctttccttcctttctttctcttccttccttcctttctttctctttctttctttctctttctctctttctttccttcttctttctttctttcctttttttttgagacagggtcttgcactgttgcccaggctggagtgcaacctcaacctcctgggttcaagcaattcacccacttcagcctgccaagtagctgggaccataggtatgaaccaccccgcccagctaattattgtatttttcatagagatcgggtttctgtgttgcccaggatggtctcgaaatcctggactcaagcaaaccacccaccttggcctcccgaagtgctgggattacaagtccgagccagtggacctggcccatgattttttcttctgtctagcttgctttaagagtatagtgcataatatctataacatataaaatctgtgttaatggactatttatgttatcagtatggcttctcatgtgtattaggccattcctatgttgctgtaaagaaagccccactctgtggttctttctgggcaattctgggaggaatttagtgtcctcagagctcctggtggaacccaggctcagctgcctccagcatgagctcatatgctggtgttttttctttcccttgcttcctttccctgctccctcactcctgcttcctgggcccacctcccagataaaccatctgcattcaagtccttgtctctggctcagctttcccagaaatcccacccaagacagctgcctagaagaaccttttacacccagtttttcttgaaaagcatgatttactcaagatcaaccagcctatgggcattttcttgaggagtttgatcgtggctgacgttgacactgggcaagtcagccatgatggcctaaaagcatggccttggaagtccaatcttttttgtgtgccagacctaaccccaaattccattttttgtttcaagtgagataaatttacatacagtgaaatacatattttaagtgaacaattcaatgactgtcaataaccaaaattcctatcaagatatagagcattttccttaccccagacagttctttcatgctccttccagtcaaaggtaaccattgatctaatctctatgaccttatattagttttgtttgttcttgaacttgatatcaatgttttcacattgcatgtattctttagtgtctagttccctttgctcaacatgttgtttttgagatctatccattttattgtatatatcaatcatttgttcctttcattgctgagtagtatctcatatgaaaaaaaacacattttgaatattcattcccctcttgatggacatttgggttgtttctactttggagctattaagaataaggatactatgaacattcgtatacaagtctttttcttgaagagcatatacatcttttcatttctatatatttggctgaatgcctaagagtggaaggctgctggcacttttttaatgttttaaaaatctgccaactgtttttcaaagtggttgtagcattttatattcccacaaaagttataggagaattccagttattcaactttctcatccctatttgatgttgtcactctcttttaattatagacattctcatcaaagtgcccaaattgtttcttaagtagaatgtgatgatttggactattgtttactgacttccctcccatggtgaaaagcgtaggcttccccaccccattgatactgggtttgaccatgaaacttggcttgaccagtggaagattaatggacaatatggaagcaaaggcatggaatatccttgtgctgtgtcttgccctgttatgtttctgccagtgccacaagaacatatcctggctaatccactgatccagtaaaggaggaaagatgtggggaagaggtagacccaaatggctgctcagagccaaacacattggagtccagctactttggacattttgggaatatgtgatccttgttttaggccaatgggttgtgggatgatttgttacacagtataactgtggcagtgattgattgccaccatagagccaggtgtccttgtcaagcctgtcaaactgcctggaagcataactgccccattcccagctggactacctgctgaagtctgcattaaccaacatagtgaatagcttcattctaactactctgggcaaccttgaacttcttgccactcaatatttatcaaaggcttgattaaaagaaacaatatttacaaaggacggtctgaaagttatgccatccagccattgcctgagtcctgtaaaatgtctcgctgcattaatctcaggtggcagagagctggtgtcctaggactgaattgtttttgctctctcagaacagcttctaccaggttgtgttttggcatgaccctatcaatgtatcacagaggaaattataggggaaaccttcatgatgcttgtgtttgtatctgctgtaaggacattgttgggcatgctctgtgaaaaggcaggggagggggagtgagttttattatgattgatattgttgtagtgttaattattgactattcaaacaacctcttatccactattcctgtctgcaatttcccatcacactaaactgcgctgaatgcttttgcttgcgtaatctttaaaatataactttacttattgtacaactattattgtacatatacagatgcatacatacatatatataggaaaatatataatatacagacaaacatagagagggaaataaaatttatttctaagactttcaatcaaagataaagagtctggattttgaatcttgactgtccagactggaattccacttgcagcatttacctttagctaactatttaatccatctctgctgctcaaatggaatctaacaagatgttcaagcgggtctcagcccaagacaattgatgctccttccaaataagttgcaagtccatgatataggttttatgaaagaagtgactcgtgcttgctttgtgacttaattgttcacccacagaaatggaataaaaggactggaggctaccggagaagaaagaagataatttttggaagaattgattctgctctgagtcctgtactctcacagaatagaaaggtttagatgttctgttcatctcaagtcaaaggaatagtgcctatagagaagttgagggcatgatgaggtctcctgcagtcatgaagacacagtggactggtctgacccaagcctgacaccttaaatggaaagaaacaagctaactgttctgatggcaaaaggcaaaatgaagtggctgccctgagcaaacttcactcccagagtctctgaggacaaaggataaacaagtgtttcctgtgtgttatgcatgaaggagcatcttcctggagtcatcccagaagctgcctgggagtcatctgaagaagcaaaaagatcacctttgaaaggagatggagataccaccagatgctttttggctggagaaggagttcataaccaaccatccaaagagagacgctttcatcagcaataaggtaactgaatatggcagatccctagggaagtaagagaacccataaacatggcccttgacaaaaatgatgagccttaaacacctgcaaatccagagagtgccaacaccagctctctacgctctccaggagccaagtaacaatgttcccacccctttcccgcctttcctcctcagcccagctcctcccacctacttccaggtaagtcactctcccaggctgggaaaggggaataatggcaaccatgaatgatgcataaagtattgattactaccctgaactaggcatattagctattgacaggaaaatgggcagaaaacacatgagacatgctaattttaatctatgggcaagaggagaatgagtccaaagggatcattttaaaaggcagtggcacaaaggaagctactttgggattatatcctacaaaccatgctgtttcaccgtactggcaataggcggataataatggcatctaacttcataaggggaaggaataaatgacctcattatgaagaaatgagctaatgtgtgcagagcacttaggacagttgctgacaatattatactaccagcaatttattgcctctctgattagtggcttgtttttttgtttttttgtttttttttttttgagatggattctcactctgtcgctcaggctggagtgcagtggcacaatcttggctcgctgcaacctctgcctcccaggttcaagtgattcttctgcctcagtctcccaagtagctgggactacaggcacgtgccaccacgtccggctaattttttgtatttttagtagagacggagtttcactgtgttagccaggatggtctcgatctcctgacattgtgatccacccacctcggcctcccaaaatgctgggattataggcgtgagccactgtgcccagcctaatggcttgattttagttacgaatgttctcagtttagagttcaaaaattattaaatttctatataaatatacatatatataataaatattaaaattaatatataaattttaataaaactagattggtacaatttttagtcatttaactacaactcatgttattaaacatttttcaaaagcaaactttttatggttacaaatatcccatcccacaatagcgcaataatatgctgaatcatttagctgctcctggattatttgagagtcattgtgttaatacacagctcagcctgtcagcactcttcctttctagccttaagtgcctgtacatcacagcatgcctccatcaagtcaggatttttgccttatcccaaacaggagagtagctctagcatcttcatttgtttttcacgcaaagaacaaaaactgtcttgttcaccagctccttttaaaattctgtccatccttcaagccaagtttaaatgctgtgacttacaggaagcctcccctgattttcttctattccttcacctgcctccaagtggaaatatttgtcatctgccttggtagagcttgacactttccatggcactattattcttgtttttctgtgagagttactgaatttgtgtcttatctccatatctaaacaataagcagcttgagggtagagaatgttcctttttcattgtgacatttattcaccaacatctgaaagtatatgctacaagtcatccattgtgcggagtgatgaggggactaaataaacaagacccaagatgagcatcatcatatttagtatgaaaaacaggtattgtgataggttatattagtttttccaaatacacacttcctcactctgtgaaaacatcatatccactaacatgatccattgatccaatagacttggcccattgacttgcttggtgttgcagttagcttttgcagcataacaaaaagcttcacatctttgtagcttaaaacagcaatgatgtcgtagctcatgattctgtgagttggtaacctaacctaggctcaactgtatggtttttctgctgatcctgcctggactaatattgggctcactcatgtgactgaagtcaggcacatggggctctgctgagctggatgatcttaaactcctcattcgtatgacaggaggccaataggcaaaggtgtctttgggtgggcctctccagaaggctaacttggacttatctacagggtgctcaaagggctgtaagagcaacataagaagacaagcacttttcttttctttttctcttttttttgagatgaagtctcactttgttgcccaggatggagtgcagtagtgctatctcaactcactgcaacttctgcctcctgggttcaagcgattctcctgcctcagcctcccaagtagctgggattacaggcatgcaccatgacatccagctattttttgtatttttaatagagatggggtttcactacattggccaggctggtctcgaactcctaacctcaagtgatctgccagcctcggcctcccaaagtgctgaaattacaggcatgagccatggtgcccagccagacaagcacttttcaaacctctgcttgtatcactaaaatgatagagaaaatttgctagtcaccagtggaagcagaacatttatggcattaaaagagttcaggccaggcgcggtggctcatgcctgtaatccccacactttgggagtctgaggtgggtggatcatgaggtcaggagattgagaccatcctgtttaacatggtgaaaccctgtctctacttaaaatacaaaaaattagccaggcgtggtggcacacactgtagtcccagctactcgggagactgaggcaggagaatcacttgaacctgggaggtggaggtggcaatgagccgagatggtgccactgcactccagcctgggtgacagagagagactccatccaaaaaaaaaaaaaaaaaagaggtcatcatgtgccaattcaaattaaattgaaattatgaaggagcagaatccatgaacagcagaaactatgagattgagaaaaatatagagagaataaacaaatggaatcaactgataagaggaaaaacgaggacagataaagagaggagcaaggattccaagagagttcaaaaatccctgtcggctttcaatgtcattccaagttcaactgcctacttgtaataaattacaataaatttcctcattcctaattcatttgaatgaatctctgttccttgggaccaaaaagacttactataacaaagttagtgccaggagtggggtttcatggaaccagacactcagaagatgtgcagggtgtttggaatagtaatcagggcagcaagacagtctttataacctgggatcaaaggcaatcattccattataaagagcaatgtaatggtacattaagctgctgcttgtggttgcctatgactcagactacctccatgggtgaggctttggaggtttgtgtagccacagagctgtttaaaggagataaggtgggggctcaaaacagctgtgaacaatttccagtggctgaagaataagttctgtatctgggttgtgcagctgaaagcagacctttgggaacatggtgtgaccctactaagtaatgccttttatgcttagaactgacacaatgagtccattgaaaagcaagtctaaaaatggccgtatgcattgctgaattgcagcatgggcgaaattcccaatattaacattttctatcacccaggttaagtatctgattgataaagactagactttgctaataaacatggtatatctggaagatattcaaagatttggagatcccctaccctctagactctgaacacttcccattttatctcccccactgccatcctcatcgacgctactctctcttcattaataatgggctggctaggcgtggtggctcacgcttataaatcccagtactttgggaggccaaggcaggcggatcacttgaggtcaggaattctagaccagcttagccaacatggtgaaactctgcctctactaaaaatataaaaaattagccaggtgtgttggtggacacctataatcccagctactcaggaggctgaggcaggagaatcacttgaacctgggaggtggaggttgcagtgagctgagatcacgccactgcactccagcctgggcaacaagagcaaaactccatctcaaaagaaaaaaaaaaaaaaaaagaatgggccgtgggctgggcacaggggctcatgcctataatcccagccctttgggaggccgaggtgggtgtatctcttgaggtcacaagttcgagaccagcctgaccaatatggtgaaaccccgcctatactaaaaatacaaaaattagctgagcatggtgatgggtgcctgtaatcccagctactcgagaagctggggcaggagaatcacttgaacccgggaggcagaggttgaagtgagccgagatcatgccactgcactccagtctgggtaacaaagcaagactctgtctcaaaaaaaaaaaaaaagaaaagaaaaaaaaagaagaatgtgccacggacaatgttgatgcttctcccaggtgccctgggatcactttttactatttttgtgggcccctgattttgatgtgcttatccttacaagaacctgcctctttcccagagaactgccctatgctgctggagcccactctagtaaccttcttcatgactttgcctgacagcaccatgcttgattttgtcaccatctttgcagaatactcctagttatggccgggcttacagggcagagccaatgataagatcacaaagcatttgcttggctccccaaaattttaggaaagaaaaggaaaaaatgagaggtggagaaaattttgtacatacctaaaatgttttaaaactttcctcttgaacaggcgcggtagctcacatctgtaatcccagcaccttgggaggccaaggcaggtggatcacttgaggtcaggagttcaagaccagcctggccaaaatgatgaatccccttctccaataaaaatacaaaagttagccgggcatggtggagggcgcctgtaatcctagttactcaggaagctgaggcagaagaatcacttgaacctgggaggtgaaagttgcagtgagccaagatggtaccactgcactccagcctgggccacagaataggattctgtcaaaaaacaaaacaaaacaaaacaaaaaaacacaacaaaaatctttcctcttaataaattgaagaagtgtttaaaaatgctttcatttgtctttgataaaaaagattactgtttgaaatattagaaaatcactcagaattatctccacatcaattcaaatgagggccatatctgggaatctcctatgtctggtcctttgggaacaagaacaagaatataagtgtgctgtgttaaggagttaaggacaccaccagcacaaagagaggtgagattataatttttaaacaaaattctctttcatttggactgggactaattcatgaattccattgcaattaaactgagtgagcacaggctgaaaccagcaagttctccaggaagaatctttcttggtgaaattgctttatagattgaggcagtgagacaccccacatcaaaatatgacttttcccagcatcttgtctttttattatcaacagtaaacatgcatcgagcacctgttttatgtgtctcgctgaattgcatgctggacatgttttaatgtctgcttaaggaggattttacctgtaagtggttttcaaggccattgaaagaaagatagtttagttacctaggaggttcagatctagaggacaaaaggacgcaggcagagcaatatgtgcagcgatacccttgacagcaccatgaggggctttgctttgcacaggagagcctctaatccagctgtgtccaggagtcaggcaggtgagtgtcccaggcagctgtagacaccaatccacaagcacttctcgtgcctgtagccccaaggtaagtagttatcctttttaaaggaattattctgggacgtttatatccaataaacacatcttctggccaggggggcacatcctggctctgcagtactccgtttgagtctaatagttaccctcttctcaaggatccagatcttggccccaaacatcctcctctttgtcccttggaccattagggtctgtgttaggcacctgctgtgtttcctggcccagtctccattcttctttctgctgcaagtaatcctttgatttacctttggggaactgtgattacaagcaggattctagccacaaggcctatgagaagctgtgatgtaggaattcagagtccagaatatgaagctgctgtgtttgagccctggtgatgccatttaccagctgagtgactgtattagtctgttctcacactgctaataaagacatacccaagactgggtaatttataaagaaaagaggtttaactgactcacagttccatatggctgtggaggcctcacaatcatagcagaaggcaaaagaggagcaaagtcacatcttacatggtggcaggctagagagcacgtgcagagaaactctcctttataaattcaacagatctcatgagacttcttattcactatcatgagaacagcacgggaaagacctgccccatgattcaattacttcccactgtgtccctcccacaacatgtgggaattgtgtgagctacaattcaagatttgggtgggtacacagccaaaccatatcagtgaccttgggcatgtttcttaccctctctgtgctttcttttcctcatctgcaaaatgagggtagtagtcacaggtccatcgtggtgagagttaagtgactgcatccaagagcctgccacaggctaagtgctcaatccatgatatcactattacccctgccatctggcagagctttgataggaaagtcagtcagcatgtcgtgaccattccacagagtggttatgtgacccttgccaggctgatcagaccatttctcccgggaatttgattcttgaaccaagtgaaaggacagaaaaagtcagggagccagtttattcaggtgatgccatgaaggtgctataaagaagctgtgtctacctcccagctttctagttggcactggtcattgtcctccccaagccctggctctttaggctttcctacaggccctgagagctgcccctgcccttttaacacatccttgttttgcctaagttgttcgggatctatttctattgttcataaccaaagcatcctggccaacccaggtccctgtggtaatgttggggacactgcagtctttgtatatttgattcaagttcgttgcttgatttgctcaggcacattctctggaatgagaagaagtcgagactaggactccctagcataatttgaaagccctcagcccctagacattacagatccaccacccaaatccctttcaaggaaagacttgcttgtccagccacataaataatgacccaaaatttattggcacaaaacaattatttatttttcttatggattctatggatgagaaattaacagagtaggagcaacttgcctccagtccaagatttcttgggcttcagctggaagattccaatgctgggggcctgagtcatttgaaagcacattgcacattcagttgcacattggaatttggggctggccatgttgtctctccctgtgtcctgggcttcctcacaacatggtgactgagtttccagggtgagtacttggaagcagacaaagccaggtagaagccacatggctgtttatgacctggcctctgaagtcacatggcatcacttcccccagcatctacttacgttgaatttccaggggagaagaaatggactttactttttggtgagtgaatggaaaggctctggaagaacatgtggagtcaaaaatattgagttggccatttttggaaaatacaacttgccgcatgttcccttagagcaaaaatagaaacagtaaactttggctccacaggagagctggagcttcaccatcaaggatgtaagaaggaaatatgcaaatatctggattcaaaaggaaaacataatggataatttgaaatagccaaatatttgtgtcttataagtaaaaacattaaaacaagcttggaaacctctagatacttgatctcatgtagaccactggttcctaacttgagcccatgacccaaattgtgatcaatgcagcctatggagatgttgtgaaagtggctcaaagaaagatgctatgctctggccacagcccttgcaacaaaccacaaggccatgtgcaggagaccaagtttgggggtgttaggaaatggctggaccataacgatgataaaagctgtgcttcctcctcacagccctcatgttagagatgcaccagctgttctctgaggggctggaagctgatgccatgtttgcttctgtaggagatgctgcccatgcctgttcacaatgccttgcatccacccttcctgcacatgccaaccctactgtctcctaccattagcacctatgatgctggtgggcattgaaagctgtcagacagagccctctcttgccccagaacttgctcagcccatgcctgaggcaggccagaagtgccagggacttcatgtcccacgagcaaccctccacagggtggagggtgtctttacctccacaggatgagtctaaagcatgttgtacacaggatcctaggggtccccagcaggatcaagtgtctctttccactccatttcctcactcccctaccagtgctgcttggcattgtttccaaataaatgacttgcattcaagtctcagtcttagggtcagcctctggaggatcccaacctaaatttaaaatgtacactcctgagacaaaagaaaggggatggatagaagaatcaaacagtttgggatgtcctacaaatgagacttgaaatcttagtcctgcttatttattagtctaatcagtcttacatgagatggtgatcagtttccaaaaacagtcatatttagataattccctctcaagcttcagggtcacaagtctttattaccctattaataggtaacaaagactacagggagcaaggtggacctcacacaaggcccttaactgctatggttcagtattcttatctgtacagtggaagtaacaatagtaaccaccacctcatgggttgtataaatattaagtatccctaatacctttaaaacagggtctgtagcaaatgtgcagtaaataccagttgcttttatatctagaaagtctcctcctgaaagcctaaaactggtcctaagctgagcgcaccagtttcccccaaacccattttttaattagtgctctccactgtattacttagaaggattagctgctaattgctaaaatcaacccaaactggctgacatggtttggctgtgtccccacccaaatctcatcttgaattgtagttcccataatccccacgtgtcgtgggaggcacccagtgggaagtgactggatcatgagtgcagtttttcccatgctgttctcgtgatagtgagtgagttctcacaagatctgaggttttataagcttctagcatttcccctgcttgcactcattctgtctcctggaaccctgtgaagaggtgccttcccccttattgtaagtttcctgaggcctccccagtcatgcagaactgtgggtcaattaaacctcttttctttgtaaattgcccagtctcaagtatttcttcaaagcagcatgagaacagactaatacactggactatgaaataaaggctgaaacaataagtcagtttttgagtcaatcaattcatgtgacggaaacatcgtggaagggctggtattgggccaagtgggcccggttgctcaagacctatatctttctctccatgtcctagctctgccctctccacattcattcctgacagagtcacccttgtgggccagcattgactatgtgctccttcctatctggtgctagtggggtctcttccacagaaaaccaataactgggctttagcttgattggatcaatttagtctatctccttattcctaaaccaatcatgatggccaagaggaaggaatagtgctgactggtttacgacagaaccacctgtcccaccccaaagaccatcatgtcatccttaggaggattacagatggacgtgggaataaaaataggcatgctgcctgcaagagaagaaggaatgaatgctggtggccaaaggcaccagaaaatgttgacctcacctaccttagtttctggcacctccttctaccagttgcacattctaggaagctgaagtccttcctcttcctctctcttccatctttcaatttgcatgacccttttattaattgtcctcctaaaaatcttctcaatccagccacttccctccattcccattgtgaactatggtcttgatcatgcccaggccagccgaatggtgtcagtagcggttggaagacagaaaccttatctgttattttaacagagagaagttcatataaatggttcttaattttgtaactaaaatagttaaacatgacctctaagatgtcacagaggtagcaacttcagaaagcagctaccagtctaaggctaaggggtaaaaaggaaaaggttggaactactgaaacctagaagtatggagaggagacaccatggagttgaagttgagacccctgaagaggggccctggccagcttgggcaggtgtctcccagcagaagcaatgaggttagctctgcacgtattatataacaacagcaaattgctgcagtggaaggaactgccgctgagaggtgaggaagcaagactgggaagatgctgtcaagaactgaaagtaaaggaagcagccagaagtgtggctgggtgatgctcatgtgaacaggaagccaattaaagggcacaggtcccttctcacttcagccttgcagctcctgcaaacaccctgtgttttcaaagccccaaaagaagcagctagtaaagcagaaataaggcttcagccctagtgatacaggcaaacccccaaattggggtcctgccaaggagggttcttggtttcactcaggaaagaattcaagagtaagctgacagtgaaagaaagccgctgcgaagtgaggaagcgagactgagaagatgctgtcaagaactgcatttattaataaactgtgtttattagagcaacgtgttgaagaagatggctgcttcatggacagaacacggctatcccataggcagaggagcacacagtagcactcgtgggttgctggctagctctatttacaccctgtgtaagatactgcaaatcttcattatgtgctaaataaggggtgggttattcacaaactgtccggaaaaggggtggagaattcttggaaccatttaagataacttccaagtcgagtgttgtcatggcatttgtaaactgtggtggagctgatgagagtgtcttatgcaaatatattataattcctagtcctagctggttttggccggtttctttgctgcatcctgttcagatcagcagggtcatgaaaacaaatccctctgatctcctacctcacaaggatcacaaaacaccgtatagaggaatgagcttggagctaagaggcaagatcttattaacagtcactggcttcctaaatagctcttttaattcactcctcattttccaatctatccttcatccctattgccccaactcacacccaaatgcatcatggcatcctggctggaccagtgaagattgatagtggcttcaattgggaaaagtgtggggtgggaagaggatttaggcatcctggagtccagattagtgcagccatgctgagaatgaaagacggtgccaccttgtgtcctgtaccctattggtgctgttagtgaagagtcagactttccaagatgattcttgatgttaaattagctttaacaatttgaatgtttttggctttgtagatatatttttatttgaatttgcaaaatctttaatagttgcataagaattataatcctagaaggctaatatgcatttgtacataaataacagttttatcttaataaaaataagttatccccggggattcacgaaaatttgctttccctttaagatgggtccatgcattactcaaattgatgaaaaggaaaaatgccatctgactcctggacaggaggtataagcggcaccaaccccatggtctcctagcctgtaacatgggaaaatggcagaaccatgagtgtgtgggggccagaagatactgctacatttttttttggatgtgttgagagcttaagatggttggaaagcttaacagagacgtggaggggggtaactagatgatggggctagataggtatccgagaaagacaggcagagaagcatttgatgccattaaatatgaccctttgtgttcggaaatgtacctgctgattaatctgccatctgtatctattcagtgaaggcacagatgtgctgaggggtcagagagagtgattagggaccattacagaagatgatgtggcatttgagttgggccttagaagattggaaaggtcttaagagatggaggactggggtgaaggcctgccaggctgggagaatgacatgaaccagggctcagaggaatggcggggctggatccctggaggagtgggaggtgacatgtggaggcttcaaggcaccaggttttgcaaggcttgaattccaggtgaaggagctgggattttatcctgaaataaaggtggagatccttgctgttttctgagagagggagggcaaaatccaaatctgttattatggttctcatttttccattgaggaaggtgacacccagagtcgctggagaccccctaagaacacagggctgtttaataggtgtggagaagcagtgcctaccccagcctcctggtctaccagggcacatcacagtaaacactgtgtgcctggctgaaatcgggagccaaaggcctcatttgcatatctctctggcaggcaaggactgccctgccactggagggaatagtccacatcacccccgacactatgctggtgacaattggaactggaggtgttcacaggccctagttcatctgggagatgtataaccatgcagccgtcccagggctgccattagcgctttatctgaaaaggccaaacagctcctgccctgtaaattatatctcatttctttaaaaaatgtgtgtggatggagaaggggcagagggatgcaagggaggaggaagggaaggggggcagcagggaagggtaaatagataaaataaatgggcttggtgcatgccttttgaccattttgctttagtctattgatttggatttttccccctaccctgggagtaatcaatttttcggtggatgggcagaatacaataatttcaagcaaactcttcaaatgggttgtcattaatttgccttctgccggtccttgttccctcggagtaagatgtgtttagccttctcggaacactattggaggtatcctctggggatttgtgggggctgattggcacagggcagggaatgcagacgtgggaggggcgaggagagctggtgcggactaatgaaggcacagtgtttgctcatctttacagagtcacttattactgctaattgggagggacagttcaaataagcacagaggagcagttgtcacaggagcgtgacatggttttaaagaggccttcccggctccctgaactcctgccgcaggcgggctggatgcctgcgcttcgcagcctccatagagtggaggctttgtcagggcgccccatagaagtcagcagtcctaagaaacctaggtttggcaagtcatcgcagggaaccacagacagacatgcagctgcctgggacacttagaaagtcaacagctgacggaaggggaggactccgagcttggctgtaaatggacttgaagatgtgattggaattaatttacacaacatagttagaggttgttttctttaaagggcctaattggttttaaagaacattcatttgtatgagtgttaaaatattaataacctgacatacatctcctagggttctgcagctttatcttttggttatttcctttgtaagaagacattaatttcctctccattctattaaatagacatgagtgaatgggccatgcccatcccgtgttatagccaatatttccaaattatttggttacatttgtgccaaccagttagtcattagccaatgctattaaaaagcacctgggggctgggcatggtggctcatgcctgtaatctcagcactttgggagcctgaggcaggaggatcacttgaagtcaggagttcaaaaccagcctgggcaacacgacaagcccctcacctctaaaagtaaaaatacaaaataattagtcaagtggctaacacctgcaatctcagcactttgggaggttgcagtgggaggattgcttgagcccaagattttgaggttatagtgagtgatgactgtgccactgcactccagcttgggcaacagagtgaggtcccacttctgaaataaatcaatacataaataagagtaaagtaaaaacaaacaaacaaaaaacatctagatcttcctggtggccacaaggaatgaatcacaactgccccaattcattcattctacaaaagtattaaatccttacagtgggccaggaactactataggtgctagggacacagccatgaacaagattaagtccctgctgtcacgagttcccattcctatggaaggctggggcactgagagtgatcaagtgatgaacaagttcatttcagatgaggacaaaaatgcaggggtgcccttgtgccagtgttttacttggcttttcagactcccgtgtttactcctgtggaaaacaagataaatcaatgctgccaagaagcaggtagtggagcccatacctttgagggaatcttagataaggccaagttcagctgtctggttttagatacaggaaatttctgattcaaaatataatcccattctgggaaggtataagtaacagattctggtgatttagtgtcaatggagaaaatttatcataagccaagtttttggtgcaaagccaccgtcccttttcctttttttttttttttttttttttttttgagatggagttttgctcttatcgccgaggctggagtgcaatggtgtgatctcagctcactgcaacctccacctccctggttcaagtgattatcctgcctcagcctcctgagtagctgggattacatgcacccaccaccacacctggctaatttttgtatttttagtagagacagggtttcaccatgttggccgggctggtctcgagctcctgacctcaggtaatccaaccacctcagcctcccaaagtactgggatcacaggcgtgagccactgcacttggccccttttctttttgtgactcagatttttaagaatgtcattaaacacacaaaaagcattctatttaaaaagcaaatattaaaccaaggatccaatctaatcatcctcatggacttcaaggttctgaggtatatcctgggccaggagcttatagaaggttgagatgagggtgagagagaggcttaggtgggatgctggtttcatccttgctctaacttggttcatggttcttatgatttataccttaaaacacagacacactgtggtggctcatgcccataatcccagcactttgggggccaaggacagaagatcacttgaagccaggaattcaagaccaacatagcgagaacctgtctctactaaaaatttcaaaatggctgcatgtggtggcacacacctgtagtcccaggtatttaggaggctgaggcaagaggatcacttgagcccggagtttgaggttgtagtgagccatgatcatgctactgcactccagcctgggcaacagagtgagaccctatctctaaaaaaagaaaaagaaaaaagaaaacaaaagaaaaaaatatatacacacaaacacatcagcagcagcagcatcacatgtatacataaccaaatagaaaattataggtggtagcaccttcagagaaaaaaagtcattttttctcctcctgaacattgaaaattacattatctatttatgacacaggcagatggtatgaatctgggctttcactttgaaagtattttcaagaaagcgacagactttccccagcgaagagagcggccctaaaaaagaaatacccatttatgaaattcatataaagcccttcctgcaaatttttgcattagttttgagatttaaactggaatgatccactgtcaaatcagactggtgggtaagcagtcagaggcttttctagagaatgtaagccttggtacttaacaagaaattagtggggtttctcagcatggaaaataggaaactatttgctgggtgatacattccattttagatttcctgtgatatgttaagaatgaatttgttgttcattgataccttccaagagaccccaacatagggcaaacaatgcccccttcacttctgcatgaatgcactcagttcttttcttcacatctggaagtcatttattttgccctgagacatctgcagaggctgttgacatgtgatggaggcaggggagctggcaagcatggcaaggccatggacgccatcactcttggtgaggcctggctttgttggaggcaagaagaggacccgcttcccaactgggagatgagtacaggttgaccaattaagaaaccagttgaataagctttaaaaaaaaaaaaaaaaaaaaaaacttctgaaaaaaaggaatttatgttgctaaaatgaatccttcatttggagacctaaaaggaaaatgtccagctcagttctctgtgggatttcactcttaatgggcataagcagaaaatatctttttgcaggcagagaggtatgtgtgcgtataaattgacgtgtaatgttgaaatcttgttttgaaataactccatgtgattgctgctttgactcctttgtgttctcattggtcagaaggtgtccttgggaatctgccatcagcaaacatctgggagcgcatatcagaagcatagagctggatgctttggaaaggtaaagtgcatctgttaatgaagccatgtagaatttcttcctctgctttcactaagagtagagtgtatgaaaatagtgcacatctctatgtcacagctaaactgcagggctgtgctgtgttgagaatgagcactggtgctctgaatatagaatgagagacgtataaagccccattgacccctcaccatcatctcactccctcgcctgagatgccagccttacagctttagttttattctgttattatagatttagggggcacatgtgcaggtgtgttacatgggtatattgtataatgctagggtttgggcatctggtatcaagaactcaatcccatttacagtagccacacacacacaaagaatacctatgaatacttctaaccaaggagatgaaagacctctataaggagaagtacagagaacactgatgaaagaaattgtaaataatacaaacaagtggaagaaaacatcccatactcatggataagaagaatcaatatcatgaaaatgactacactacccaaagcagtttacagatgcaatgcaatttctatcaaattaccaatctcatttttcacagaattagaaaaaatgattctaaattcatattgaacaaaaaagaacccaaataacaaaagcaattttcagcaaaaaagaacgaaaccaaaggcatcacatttcctaacttcaaactctactataaagctatagtaatcgaagcagcgtggtccatgtacaaaaaatagacacatagaccaatggaacagaatagagaacatggtaataaaaccacaaacctacaaccaactgatctttgacaaagttgacaaaaatagacaatggggaaaggacaccccatttaataaatggtgctgagaaaactggctaaccatatgcagaagactgaaactggacccctctcaccatatataaaaattaactcaagatggattaaagacttaactgtaagacctgaaactataaaaatcctagaagaaaatctaggaaaactcttctggtcattggcctaggcaaagtgttagatctttatgggagcagctagcattgtcctttcctagcaacctcactgaatatgcaaatctccctgcaaggggcaattcttggagttactaccaccacaacttgataggaaggacaaaatagagagcataaggatgatatttggggctagaggttggtaagagaactccaaagactggtgtggcttgttacataattttaacaagggcctgctctgctgaggacccaaggaagggatttaaatggctgaggaggaggaatagggacatcacgtaagattgttccccaatcaggctgaatccttccaggcttttacagagcacactcaagggaaaagggcaagggggaacagcctgttggaatagcaatgagaatgcaatggcagtagtggggtagagagatgattatgatggacagtgtcaaaaggaagccacagaggagaatttcccacactggagtcaaagggacagagtgagtttggtccacatggagaggatgccattggcctgaagctaatgtaatgaggtagtagttcatagtattaataatggaaatcttttacttgaaacccaggagcttcttccagcccctacagagaaatcatgtacttctgaatcagaagccagatctacagatattgcctactgggaaaaaggggggaaaggagagacgcaagctgaagatcttggcatgtaacagaaacattcagaggcataatttgcagagttttcctgctccaagacaggagataaaagttgctgtgatctggtcgggcctgatggctcaagcctgtaaccccagcacattggaaggccaaaatgggaggatcacttgaggccaggagttcgagaccagcctagtcaacatagccagaccccatctctatttaaaaaaacaaaagttgccatgatctgagcacacaaaggagggaaagataccacaggcccaagagagggtgaggctgagaaaccaagagagaacaccagagcaggcttgcctttcataagccgtagtgtggaggtgtgaggaatttgttcaggtgtttattcaacaggtatttattgagtgcctgggctatgcctactactgttctgtgcacctgggatatatccatggaccaaacagaaaaagatccctgcccccatggagcttataacccagcagaaaagacagacagtacacaataagcagaaatcaacaaaatacatagcctcttaggggatgatctatgccaggaataaaagaaaagtagaggggtagggggatcagagtggcttgggggagttatttagcagtgggcttcaccaagccagattgcagccaagctatgaaggaggtgagggagagagcacacaggcagcgtagccttatggcccatcacggctgtccagtagtgcccttgctcccggtagacagcccatccatggctgactttggaatgaaacttgtctccatctacaaaattcttttcagtcccccaagactcattctgtgaaagccgccaccttctgacaacccagcacatgcccagagtgaagggacaggatggagattctttgagatggtgacacggagttagaaagccttgacaatgatcaaagcagaatggggcagaaacaggttgcaaacttgcccgcggagctagaacagaggtaggacccgcaaccaacactgatcccttctatttcagaatctcacccaaaacacaatcccaaatgagtttttagatacttggctgttttatatatttatttatttatttatttattttctttctaattgggtttctactagacaaccaactgtccacaagaatcaacctacatctatgataccttcttatttttattttatcaggcttatttcattttgactattgggtcattacaccgtttaataattatactacatattaatattttttctcagcaaaagttgtatcaatagtgctattcgtgaagtcacaagttcgctagaaataaagtagtataaataaaactaaaaatggataagaatgatgaagtttttatatccccaatttctgaggttgccttgattttaaaatgctgtttctgacaacattaccacatactagaaattgaaacttcatctcccagcctgtcattcacactcagaagcggcctgataatcagctactgaccaggtgtgacaagatgtcctaatttttagccttgtacatgtgatcacgggagaagtggtgtgtgtgtgtgtgtgtgtgtgtgtgtgtgtgtgtatgtgatgtccatttgtagtttgtcctctttatgagtcctcaagaatacttgagcctctctacttctttatttggaaacaatcccaaaggttaaagcctccaggagttgagatttggttcccgaagtcatgaagcccaaggtcccacaagcccctgtcctttgctagtggaatccttcctttggtttaaataggaagctttccttggcaactctgatgatgacaccttttgtatctatccaaaaggccagtttactggtcaagagtgtgggctgggatactcaagagttcagagttacatttctatatggactcccatcccatttttaacttctcccatgtttatggtcattgcccttgtggggtgcttagaataacatggagaacacagaggctgatctgggtgtaatggtgctataatgccttctagcatgaggcagtgtggacagtttgagcctggttgaaaggaattcattttgtcaaggtttatataaatccaagccctcctcccattgcaagtgccattgtccccactcagctgcaccatcatgatgacaaactgcccccatggcaagcaatggaagtgaaggtagaagaatggggggatggctgcatcccatcttggcctcccgtctttcaggctctcagtgtcacattctgtccagaccatccacaagcccttacagggttccaaacgaatgctcacttccctccacatcttggcacctttcctcacatctggcaccaacaggtcttattgtaccataaactctgcttgtctgtagggggaaaggaagacaagatggcttgaggtgaaaggaaataaagtatattaacccaagtaaatttggctgcagatgtcaccacttatgcaaggagtgcctgacagctcccccgactccagttgaagtctcccaccgctgttcttctagatgggagtgcagtgctcccctgcatctcatctccccaactcctcacaacctccatttcctcaggcataaatttggggaagcgttgtctacattacggaacgattgtcaggattaaatgagaacatacgtgtgaaaccctcacacattgtccagcatgtagtcacatgtaacaaatggtggtggggatgatggtgtatgagtggaagccaattttgattatttttcagtgttgcttaattcattccaatgaagcacttactgcgcgcctccctgcgatgtctgtgggtgcccgtggtgaaggctgcaccagtgaggacaactctggatggagccagagagcaggagccccacggtgaactctccacctcctcacactgggccattactcccccagagccttcatttcccatctccccaacaccctcataagccctacatgaagagatgagaaagggaactgaaggctctttcctgcttaaaaccatgaaaaggccagtcgcagtggctcacacctgcaatcccagcactttgggaggccaaggtgggcagatcacttgtggtcagaagttcgagaccagcctggccaatatggtgaaaccccatctctactaaaaatataaaaattagccaggtgtagtggtgcacacctgtagtcccagctacttgggaggttgaggcaggagaatcgcttgaacccaggaagtgaagcggaggttgccgtgagccaagatcatgctgttgcactccagcctgggtgtcacagcaagactctgtctcagaaacaaaaacataaaacaaacgatgaaatacaatctaccttcattaatggaataaacaagacaacataggacaatgtgatttgaggtctccggggcaccatgcttccctcatcccgtctaagcatatgaccatgggggaaagtatcagacatctcttatccctggaaatagccttttcccggccttcaaattcaatttcaacaaatatttattaagtgcccactatgtgtgacgcattgtcagaccagaactatccaacagaagtttttgtgatgggaatgttctgtatgtgcacggtctaatagccatgtggttgctgagcaattgaaatgtggttagtgtgacagaagaagtgaatttttaattttgcttaatgttaattaattttaaattaaatttaaatagccacacgtgactagtgacgaccatatcgcacagtgagggactagacaccgaagattcacaggacagctaaaaatcctcactttcttgaggtttatattccattaaaaggaagtggggcagacaataagataaaaaagtgaaatatatcatgagtcagacagtgaaagtgctatagaaaaaaagcagtaaagccagaatcaagttaggaaaggtcagaattctgaaaggggtggcagactgaacaattttcatgcccagtgaatgtcctgtaaaggtgaaactctcagactttattttaggtactgccaaaagcaaactggagagtctagtgcacctagtttttgaatacacccataagtcaggtgtctgatttgaacagttgcttttatccttctcaactctgtactcaaaatgcaccacttctcacttggtacaataatcaggaataatgtgtatcttaatggagcttctccattaaaaggttttggaaataatatataaaattaatggtttacaagaatagttttagacacttgaaaacatagctaacctaaagaccttcaatgcaccatgaatacattcattccccgaataaaaacgaatcccaaaattggttttgatttttatttaaaattcaaatgtctgatgtccttaaattgaacaaatgatatttaaaaatatctatatcagcctccaacatctgcagattgcgatttgcattttgaaattggctgcttgaaatgaacggggatgagcgctgtcattcttcttttcctccctctggttatttaatgaaatgcgagaggtcaaccctttgtccttaaattagttcccataaaaatctttttgtactttgcagcttgttatgatgtcttgaggctgaaggaaacgttgccattaattacgtctttgtggaatatggatatctattcagagttagttgaacagtttcaaacaagattagcatcgagccacactcgggccagctttgggttggttatcaagaatatttttctctttttttctccctttctttttttcctttaaattttttttaaatagctgagagaatgctcttcggcaagtgtgtattatctaatatattcagctttccgttgctacttttttccagatgaagatgagcttaattgaggttgtccttttaagtttgtagggcccttcagcatctcacacaaaagcatctagaggcttttcatttgtcttgagtatgtttcagatgtacaaatattatttactttaaacttcaaatcaaaaggtgcactgtaactgttttaaataaaacattagtcaagactgaaatatatataaattcaaagcaatactttttttttccatttatgtgaagggagctcagttaacaaattttaggatacacgtcggaggaactgtttagcaacacacttcaagcaagcaagcacttaataaaggaattcattcccagtcctccaaagataaatattacaaacccactctacagctaagctgcgaagttagttttctgttgcagactctcttaaatgtttgcttgaataagatggggggtaaaattgattttgaagaagtgaagctcatcagtgaaatgtacccagggtgctcatctgggggggcattttgaaaaaatgaagaaaaacattcagctacaggctcagctctatacaaacctgtttgtagtatgagggtcatgaaggctgatgagtggaacttcagccctgggagaaaacccttttctgtgagcatttaaatcaatatattagaaattatagtacatcctagagaacatggcagaaattgtgaaaaacagagtaagatctctttttgcttttaataataataataataagccccaaggaccatactaacaaagtagattgatccgtttaggaataaaattctcaaacaaccctgtgaaagataagtattccctattgtagcaaaaacaatgagtatgatctttttttcccgatgaagatcctgtttaatgtcttaaaaatattttgtagtgatttttattttcattccttcttcctccagctcctttcctgaatatggaaccagagtgtcccttgttgtgaagcattcctgggaaagaggcgctaaccttgtatcgcttttgagtgtaatatacatttttcattttaaatgggagctcataatgacattgtgtggaagggattccaggcctctgtgattatcaccatgtctccttgagctgcgcctctggaaaaaaatgtgaaggaggtagccctctggaatgaataaatcctgccgcctgcctgtaattatttattaaaatagattaaagaaataggctaaaaaggaacccgccacccatgttagagatagcataataagagtacatagaaagggaaaattaacaccagggaggaaggaatgttagatatgtgctttcaagaatacggccatgtctgcattgttggcttacacgcagacacacgctcgggtttttcatttggcagggtgggctgtgctgatgaaaacgtgggttactaatactgatgtgtatgtctctaattaacattagaattgagtggtaaacataactaggagagcattcaagagagaaatgggctaaaagagaagccaatgtgtagagaggagggggaagagacgggttggagagaagaaatcggtcagcccttgttcagatgggtttaatttagtcacttgagtcaaaactggaaacctgttttctagtacaattgcttctgtgtttagtgggtgctgtccttgcaggcgcctttcattgcaggtgaattttataaacagcacaccatcatcaaaccatcttgggggtcaactttttccacttgtgcctttagctcttacgcaagtacttttatagtgtcttctaatatacaggatttatcttcggttctgagaagagcttttaaacttaatccctcactggagtactaatttgtttcttcatccttaaaccagtactttcggttaactttcatcagaaacggtagatttctttagtatggccactcgagaaacataggtttgtgttaattttttgttttgttttgtggctgtttttgtttgtgactgctgggagaacaacagggtgggggagattttgatgatggtcgctgatattattcttgtatttctgtttcttaaagttcaaagtacataactggaaatacctgtggacggttgccttaaaaatatttctaatcatattcgcctaaagaaaataaaaactactacctatttttaaaaaaaggaatgccagaacttatttttgcttttttattctggcttttcccatgatatttgagtggaataatatgctatgatgtttatgtatgaaaaacagaatacacttgcatatgttatgaggaagaaagctgcttctaggaaaacgaactttttttttctttttttatgttttaggaaatgatttatcaaagtaacaaaataactcattgggaaagcagtgttatttataaaaacaatcagcctttgacttcctttcatttttataaggctaatgtaacaaggatgttgcagaggcaaaaatgaactcgaatccttttaaccatatgaacacttatgaattttattgcagctcctatgtaaccactttatttaaccaactaaataaagcatgtactttttaaaaatatttaatgttcagcaccaaaaactgtatccaaagaaaatgtacatttcctgtgtaatatctgccttgcctcgttaattcgttagaaaaaaatatatacaaacatatccagggaaatgctttgggttttttctaaagtcatagatgtttgtgtagaaaggaatggaaccatcttcacacgtgaattgaaagcggagatcttcagtgctggagttcagaaaatgaagagaacttacaaaaatgtacagctgggaatgccattccagtggatcttccccaccacgaagttattactgtgtgaacaatgttcattagctttaccaatattgtacttctgtttatctgccattaccatcttcacaaagtaaatcactcctgttcttcccagatcgcatctcttcccccaccctctgaaaaccaacatttgttacccataagcagggggggacgcttagtgataagtataatagcttaaattgaattttccttcgaatgatttagtgaatactagaacacatttttactttgttgtttagactcaagaaggcataaaatctccgccatctatttatcatgtagttattttaatgtaaacatgtgtccgtttagatgaagtgttttcattattaagctaattccaacgtgtctcagatagaccatgagaagggagccgagctctggctgatggggaaccgaaacctgcctccgctcagcctgctgtcagatatgtcttcattagttttttgtcattcaccggtggcaaatgctgtataaatggaatgatgatcaggcccgccttgataacttgtcttatctcattagttttcacatcaaagttaatcagcaatgtgaattgtaattgctagaggagacaatgcgtagatcgctggttgcttttttccccctcccctgtatggcatcttgaaacatcagcaggctggctggagcagataggctcggaaggaaaatgatgtggaaggcataataagcgagctgctcagaattaatgagctaacccagtaagaaaagaatggccaatcaatgtgagttgggcaaatataatttagaaataattgcttgattggttgcctatagtagactgatttgaccacatacaaggattaagaattaagatgtcaaggcaaaaaataatttggcaactgagggcatgtaattttttgtgtccttccctttatgattgaaagagatgggtgtttgagatgctattcgccagaatgaaaacattagacaccctctcgttctctttctgctcctctcacaatgcaggcccattcagaacacaattgtgatactcctggacaggacgtgaaaaaggtatggattgagagagagagagagagagagagcgtgtgtgtgtatgtgtgtgtgttcccatttattgcagttatgcccaaaggatgaatgggttggtacataaggtgtttgcatctgcgctgagctgcaacatcattgggaggcatggcaaagtgagagatgtggatatttgcaaaatacgtcaattgtctgtcctcggccgaagagttctgctcacatcctacatgttcctaatgcaattttccccacagctattcaccaattagtagagggcccttgctatattcttctgtctaaactattgggaaggttcagccagaaggtaaatttgctttgatctacattacacctaattgagtcaccagcaatgtctctatcccaacatcaagaaatgtgaaaatgttagattatttcactggggattaaacctaattttcgtgtgttctgcattaacctattaggctggctaatctgcattgctaatgtgactgaggcagctgtcacagctaaagaaaaacatgatcatgcaatccttgaatgaatgattcccagcctgattagtcttagtgaagttagctgagccctggtgataaggaaggaaaattcccaggttgccaatagctttgaaaattatcagactgtaggcaaaaatatacctcatgattcacaggcttcggtccaaataccgagttgagtgacattatttaagactgactaaggctaactcgaattgtcgctcgcataaatgtttgtgtttattttaagggactaacgtaatggatgcagatttaaatgctaatagacgccagccagacacataaaaccccaggcattgttaccctgttggtcttttattaacatagattaaattgtaatattttctagataaattggcaaaatcagaaagatgcattgccccccagaatgctcgatgaggacgacttttgcaggacttctggtttttcgggagatgaggatcacagtagtggaagtttacacgttcactactctcattatcagtttaaaaaaaaagaagaagaagaaaaataggggaaaaatgtgtttataaggaggaaaatagatttctgcagctcgctggccagaaccactttctctgtctgtccacttaattgggaggactcggcacgcatttctcctcatccctgtattttgttcgcttggagaaggcttcgctgcagtttcaagactttgcgtgctcctctccatttgatttcaacagcaagagagccaccatgatgggtacccttcagatgtggaaagtgttcaagggagtttggtggctgcaaatagagctgggagtccatttaatccgattagcagttccgcaaaatgggcctcgacccattgtggacagaagcctttactttatttgtttccattagccaagaatcagttatcagaaaagtggaattttgccccatcagattgcccagacaatcaacagaaaataaatgaggaaatagtctaatgtgtcaatatttgtcttttggccctaattgtccacagaggggacttgctgagtgtgtgaagttggcagcctgggtttatctgtgtactcttgatggtttttcccactgtgtaggcaccggagccgctacgtgcacagtaatgacatctcaaaggccaacagcactggctggagaataaaggcgttttaaaggtctaagaacactggattgaagagccaaggagaacccttgatggatgaggaggaaggcagagcccagcaaatgacaaggcatttgtgaccaggtttccaatgccggagtgaggtagaacaaaagtactgaagagacaggagcttccgttcctgccccggtgccagcttgtctttcccgtttcccaggaagctcagctgactacaagcctacgggggtacggccctcctcttatttctgttgcctcttgttagttgagaaatgttagtgtctcaaattgttttagtccctcaaattgcctttaaggataatggtaataaaatgatttaagctacaatatttgagtattcactatttaccagatactattctaggcaccgaatatttgatttccccccaagccccatgagatgctgctatcattaggcccattttacagatgagtcactgaggccctgaaaataatttgcccatattcactccaccagtggccatagagccatgccttgaacctaggcagtctcacaggcttttcattaccactggaccccagattccagggccaggcctagagagccagtgtctcttcaaattttacaccctaagtacccaccagaatccccttcccagacaccttccttccttcctttctactgatctctccttcgcccccttgaaaagctcaagacatggctgggcatggtggctcacgcctataatccctgcactttgggaggctggggcgggtggatcgcctgaggtcaggagatggagatcagcctggccaacatggtgaaaccccatctctactaaaaatacaaaaattagccgggcttggtggcgggcgcctgtaatcccagctagtagggaggctgagacaggagaattgcttgaacctgggaggaggaggttgcagtgagccgaggctgcaccattgcactccagcctgggcaacaagagcaaaattccatctcaaaaaaaaaaaaaaaaaaaaagaaaagaacagctcaagccacaacaatggcagaaatggtgcacaagcccatctcacacagtccccctgactgaatgttttcaataacaaaatcccactcagttttcacagaatcttttcactgaaggtgggacagaaattttgattatccaggcctcctttaggcctctcagaccacagtgacacttgagccccaagtcagcagagatcgctgccaaagagtcacgctttagcaacttatctggactgtggacaatggccgtgaactgacccttttccccttgttcagctgaaaggtgccctcccctctggttccctgagatgagccgtggctcctgattcattccgagaagacagcaattggatctaatcatggagcacaacacacgctggatgggccatcagcgcagagccataatctctgcctggagtgagttcttccataactccagcccattgcacaaaattgacgggctcttttctttttggctggatctgatagcattctgggaagtctttgtaccgctttatatcacaggatcactatacctgtgtgggaatgttaacaaaactatggttatgaaacactgatattatctcttagtaaattaaatctgcctttcctacgaatagtggagttaagaaagctgagacaaattcttttttcgaaaaacatttctttgaattctatattactcacacgtaggttattttctcttctttgcaattctactgggcccattcctctctaataatgtgatgtggtgtcatcacatggccaaacatctttttgacctcccataatagcttctcagagacacaggtgaaggtcattcccatttgcatggccctcaatacctgatgaacacccaggaggtgccagcaatgtttggcaagcatatcagtctcctattgctgccgtaaccaattaccgtatgtttagtggctaaaaataatttaaataagttttcttacagttctggaggtcagaagttcaaaatgggtcttaaaggtatcagctgggctggttcattccggaggctccagaagcgtccctcccttgcctctcccagggtttagaggctgctagcattccttggtaccaggctgcatcactccaacctctgcttctacctctgcttctgtcctcatgtcaccttctcccactgtgatgtcctacctctctctcattaggatccttttgattatatcaagcccacccaggtaaaccaggatcatctccctatctcaagatccttaacttgatcccatctgaaaagtccctttgaccatagaaggtaacatgcatagttccaggaattagaacaagggcattgggggaggaggggatgagttattcagcctacaacatgcaatcgatcctgggaagagaggcaaagtgctcgtcattcatttgttcattcattcattcatccagctgcaaatgtgagtttgtgggcaccatgttcggccccaggactgcagtagagagcaggacagtcttcccgttgtgaagcgtgagatccatagagggaacggcagagatcagatgacagggagcccatccagcctgggatgggcacttgtgtccagaaagtcagccctgagaaagtgacatttatgccagggcctgagggaagggtaggactttgccaggggaagaggttagggaaaggtgaaaaagccacaaaggcaaaatgaccatccaaccttcaagtaattgtcagtctagaggggtagtgtttaactgcagtgacaatgattttcattgtctactatggtcgaagctgagagctctcttctaagtgagcattaatgtttctgttgttttcttgaaagggcgaaggatcccagggggtaagaggaaggtggggcaagtcagcagaagcttactccatcttcaacttctttttgtttgtttgtttgtttagacacagggtctcacgctgtcatccaggctggagtgcaatggtgcaatcatagctaactgtaatcttgcactcctgggcttaagcaattctctcacctcagtctctcgagtagctgggattgcaggcatgcaccaccatgcctgacttacttttgaaattatttgtagagaggggtgtcttactatattgcccaggctgatcttgaactcccgacctcaagcgatcctctcgcctcagcctcctaaagcattgggattacaggcatgagccaccacacctggtcttccatcacttctgattggactcttgggctgcatagcttccatgaccaaaaggtcctatactaaggatatttacacagcctctggaaagctgctgcaagacacttattaattacaaagggaaaaatagtcaattcaagtaaagaaacatgatgggccagtgatcagagccaacatcaccagtcatggaacaacttgacatcatgcacctcttaataggatgcattgagaggggttccacagcagtcttcctggggtattcctgccccacgtgtatctcctcaatacagtcaggaggaaacatcagacaaacccaaactgagggatgttctgtaaaacaggtgacctatacttttcaaaactgacaatatcgcaaatgacaaacctacttttgtctctatagatttgccacttctggatattgaatgcaaatggaatcatgcaatatgtagtcatttgtgactggcttctttcacttagtgtaatgttttcaaggtttgtagctacatcagcacttcacttattgttatggctgaatagtatttcattgtatgggtatattgcattttgtttagcccttcatcaatttccactttgaggctattatgaataatactgctatgaacatccacacacaaatgtttttgtggacgtacgttttcatttatcctgggcgtatacctaggagtgggattgctggtcatatggtagctctatctttgaccttttgaggaagtggaagttgtttccaaagtggctgcaccattgtacagtcccatcaccattgtacattgtagtgtgtgatggtctcagtttctccacacttatcaacacttattttctgtcttttttattctagtcatcctagggagttcacattggtatctcattgtggttttgattccttgtactattcttacttttctgtaagtctgaaattgtgtcaaaatagaaaatgaaaagaaagctattctgtgtcattattattctatgataaaaggatgttggggagaaatcttatttctctctgaaactgagctgatgaatcaacgtacagatcctgaggataagagcagagctaatgacctgagttctagaaattccaatactttctgggcccactgtttccattcattcactcaaaaaacatttaccaagctccaattataaatttataataagatgggtaagtattagtcccagagagatattctccgtctcatgggaggaaatatatttaaactaatactattgtattgcctttccattattcattactctccaatttgccacagaccccaccactcactattgtctgagtacctgctatgctcatttcccagtccttgcttggccctataagtactcaatcttgcaagtatgacagagagagcacctgaccatttgataatgtcagagaaagcctcccagtggcaagcgcctgtctaacattagggtaaattcaggttgtactctatgtacagaattcccctgacctgacctattaaatcctacaaaagagaaaagaatatttgtcaacacgtttgcacatctcaatagactcttaacaactatagtttctctcttaattctcataaatcatctgcttaataattgacttatttgtcagaaattgacattactactcattgtcttcagttggttacccataaagcaaacccactcaaactggattaagaaaaagagacccacgttaacagatgtggctttgaacttggctagacccagggtccttccacagctcagctcaggtggcttctgtttcggtttcatctaggaaaccccctccatggattgggctccgaagcccccaggcctatacttttctcacattagcaatcccacacttccaacagattttagaatcagtatctttagcttaccatctcgacgcctttctgctttatcacatcctacactgtcagcaaatcatgtccactttcctcgaattagatcctgaatctggtaaattatcaccacctccaccacttagcctccgctacctaagtcatctttacttctcatctgcagcccggccatagcctcctaactggtcttcttgattgttatccttgacctctacggtctactgtttttttgtttttttgtttttgagacggagtctcactctgtcacccaggctggagtgcagtcagcttactgcaacctctgcctcctgggttcaagcaattctcctgcatcagcctcttgaatagctgggattacaggcacgcaccaccacgcactgctaatttttgtatttttagtagagacagggtttcaccatgttggtcagacaggtcttgaactcctgacctcatgatccacccgccttggcctcccaaagtgttgggattacaggtgttagccaccatgcccgtcctacggtctactatttatacaacccctggagtgatcctttcaaaccttgtcagatcacatcactcctctgttcaaaaatttccaatggcttccatctaggacacaataaaacccaagtccaccccaaagccttgcctgatctgaccaacagcttcccatgacgtcagggcctggctttgcctgcctatctcagcccactcttactgctggcctccttcctagccctccaggatgtgaagcgcgctcccaattcagatctttgctcttatcattccttctgtctgaggtaatttcccagatctacttctctaattcactcacctgtttcaggtctctgctcagatgtctctttttttttttttttttttttgagatggagcctctctctgtcacccaggttggagtgcaatggcatgatctcggctcactgcaacctccacctcccgggttcaagtgattcccctgcctcagcctcccaagtagctgtgattacaggtgcctgccaccacacccagctaattttttgtatttttagtagagacggggtttcaccaggttggccaggctggtctcaaactcctgacctaaggtgatccacccacctcggcctcccaaagtgttgggattacaggcatgagccaccgcacctggccagatgtctctttatcaaaggtctccaggccttccctgacaattttatccaaagtagctatgcccatcaagccctatcctggtctatctttatttttcttcattgtactcatcagcacctcatacatgatatacttattatttttcttagtttgtctgctgcccccaccactggaatataagagaaagaatttgttttttgttttgttcattgctgaattcttagagcctatcacagtgctcaggcaatagatatttacccagtgaatgaagaaatgtctagattattccttcaaacaattactgtggcaatgggaagggaatgcatggtttatgtatcctaagtctgatggggcagagtgattagctctatccaaacctcatagagtaagaaaaagagagaggagtggttttctgtcttgacctggcttcccctagaaagcagaaacagatataagggcttgctgcagatagttcattttgggaagtgttcccagggagtggggcaggggctgggaacagtgaaataaggaaagccagtacagctatgcattaaacaaaggcagtgaggctctacccagcctcaaaattagggccccaagggacagcagagggaagcatttatccacgggctttcatcccccacaggtcaagggcgtccataactcagcatttccaggttttcccaggtttgctaagagggctcccacagatattctgcgccccaagcagaaagtgagatagaagtggtccagtggtgcaactaaggcatggtccttttaggttactgctgcatgaaggtggttgccacatcaccagttagaataaaagatggccaaagaaaatgtaaacagagaaaaaatacaaccaatacagtccatccctcagtccactaggatctacgaatgcagattttcttaaccctcaattggtacatcagaaagtctaggtggcttgcttgtgacctagacattcatcactgaaggaagtctatggttgcttcacccttaatgagctgctacaatgacagctacctctggacgtgaaaacaccaagagacaccccagtgtaacaaagatcttcagaggcattagggctgattactaccaccagaacaataactcctgtgtttgtccacgagcatgaagagtccaaaataaccagattcatagtttccagttcagtggatccctttctttgttctactgtgtaagcattccccttcctgaggccaagacctctaattcagagaaaacagttgggagatgtaagtacaacatctgaaagtggattactgggactgatacaaagaaagaccaatcatactaacaatttttggtttcctgaccagtgaattctaattacagggtcacagcaccctatactggtcactggcttactgtatataatggttcccagacgatagtatccgaattccacaagatacatccctgagatggtaacttagctaagcctttagcagaccattctgtcattctattaggctggctgtttctggttggaccagtggatcccatggtcatttgtctgttatcacatatccttctccattgaatggtcccttatctgagacaataatgtgcagggccccatgtcagtaaatcaggtatcctgtaaaccctgagagagtggtgttgacaaaggcattgagttcaaacagggcaaacatatatccagagtagtgtcaattcaagtaagaacaaattgtttcccagttcaggatgaaaggtgtttgatgtaatcaacctgctatctaatggctggctgatgtccttgagggatggtgctatgcttagagtgcaacttctgtcttttctgttggcaggttgggcattgggcagtggcagcagctagcaccatcttggcaagaaggcacacacacatggcctccatccccaccacaatggtcatctactcaggaacccatttcagaaatactggagtagcctaggaaagaagttaggggatattcagaggatgagtcattcattaggaaaagcccacctctcagagcattagaataagacacagcatcccctacccactgccataggtcagttctcgtactcatacccagatgcctttgtcttcctttttccaatcttattctctccagacctctaatcaaccaactaaaccattcactacagtcatggactgagggctttcagtgtatccattgctagaatgacatacattgcacccattaaatagtttgtcatcttctgtccccctcccactctcacccttttgagtctccattgtctatcattccacactctatgtccatgtgtacatttaacgactctttacaagacatttggaaaaaaattaattagtgaattaaaaaatcacttttttcagttaaacaaagaatgaaagagtgggaggtcctcatcatttcctcatccaattgacatatatgtgtgtattagtctgttctcacactgctataaagacatacctgaggtcgggtgatttataaagaaaagagatttaattgactcacagttctgcatggctggggaggcctcaggaaacttgcaatcatggcagaaagtaaaggggaagcaaggccatttatctatttttgtttttattgcatttgcttttggagtcttcatcattaattctttgcctaggccaatgtccagaagagtttttcctgtgttttcttccaggaattttattgttttaggtcttacacttaagtctttaatccatcttgagttaatttttgtatatggtgggagacgggggtccagtttcgttcttctgcatatggctaaccaatttttccagtaccacttattgaatagagtatcctttccccattgtttatttttgtcaaatttgtagaagatcagttggttgtgggtatgtggctttatattcaggttctctattctgttccattgatctacgtgtctatttgtaccaggaccatactgttttagttttacatgctattttaatagtataataccttgaaatcaggcaacgtgatgcctcaaaatttgttctgtttgcttaggattgctttggctattcgggatctttttttggttccatataaactttaggatagttttttttctaattctgtgaaaatgcctttggtcacttgataagaattgttttgaatttgtagattgctttgggcagtgtggtcattttaatgatattgattctttctatctctgagcctggaatgttttcccatttgtgtcatctgtgatttctttcatcagtggtttgtagttctcctttaggaggtgttttacctccttggtaaaatgtgttcctgggtattgtgtgtgtgtaagtgtgtgtgtgtgtgtgtgtgtgtgtgtgtgttttataaatcagatggcatcctgattttgttctcagcttagacgttactggcgtagagcaatgctactgatttttgtacgttgatttttgtatcctgcaactactgaacttactgatcaagtctagaaatcttttggaatagtctttagggttttctaggcatacaatcatgtcatcaacaaacagagatcatttgacttcctcttttccaatttggatgccttttatttctttctcttgccttattgctctggctagtacttccagtactatgttgaataggagcagtaagagtggccattcttgtcttgttccagtttttagggggaatgctttcaacatttcattcttaaagtctttgagagtggcacaatggctcctgagatatgtttttctgatttactactttggccaggacagggaaggagcagcttaaggggattctactcggcccttccttccataatacctcttcatccacataacaggaaatcaatgtgaggattctttcagctgctaatgattgccatcctaattatgcatctgagtgtgaggcctcattggacacactgtgagatcaacttgtccagaattccacttgtcatctgacctccataaaacccactctaataggagcccataatgttgttttgggtcccctagtatccatgtcagctcagttctatatcaaatagctctgtaaagatctgtgtatttcctttttcctagtgcacagttgccatagcaaatggtcatgatagtctaattgactgaaaaacagatgaaagggaaagtttgtagaagaaagtgagagaaactcaaaaagtctatacccatagaaagaacatagactttggatccctatatatctgtgctggatttccactctcccacccattggctatgtaatcttcaacatcacctgaaaagtgggactgctaaagcctaccttgcagggacattccaaataaacagatacagtaaagggccaacacacagcagactctcattaaacaagtagctgttctattaatattaccaaagaaacattccacacggaggttcatgcagcacagtcttgggtaaataatgagacctttatatggaagctttctgtatagaacagtttcacttggtgatgttgaggtaaaagaacaatgagcatctgcatatagtaaaggaagtgtgcctttggggcaactggatcttaccaaggaacaggaagttggtctgaaatgatatggtcatgaaaacaagggctagatttatataccgtcttagtttgaactccactaaagcactgtcttagttagggacttgggtgctgatggttaatttgggaggtgattccagggagggaaggtgggaagtgttacagaagaggaaaatctagtaaaatatatgttattaagcttgttactgctgtgggcaactgaggctcaattctgctggtaaatcctatagcatgcacttcattatcctcccttcaaaagactagaagttggaaaatccatgtttaactgctatcagccattgttttaggactaccccaggaggcattgcttccagcctacctggggcacctgtggctgagcaaactttcatggctccagagagcctaaacaaggcaaacagagctttgtgataggttattgaagtaagagagtaacacatacttaggagatgtctgccatcgccaaaatcagaggccagctaagggcatgtcacacagaacacaaaaaagtctcctacatacattcttacattttcagatttcattgttattttttggctaagccactgaggtgttttgttttgttatcttcagtttgcccttctccaacggtctcaagaaagaccataatgatctcacatttgctctatggctttctggcatttgcttctgaggctacctaacatagcacaagaactttcttgagaattttttaaacatggtggccttccctgatgtgcagtcactatacatggcaggaagcagagtgcatggggtaccaggtccaacacagatatcagcagcaaaatgtagtgcttggatttggaagagtgtctaaaggatttgggttctacaaacattgcctttttggcagcttggaacagctataatcctgtgtccataaatttcattttattttaagagaagctgtgcctattttcctttagctgataagaagtctccttgcattatgaacaaaactccaaagcttatgtgcaaattcatttggctctacctcagaaacttcccaatttcccatttcaggcctgtgtacaatagaaacatctttcttttaattgattctggagagaattataatcagtctttggcttgggcatcccagcttcaggaggtgaaagagatgttatggtgattggctttctggtttcttggtggccccacaagggatgtacacaaggccaggggtctgctctgcttcatcagaacctaggcccttggggcaagaatggaggactggcagagcgaaagcaggctgaagctgccatgtcagcccagtttctccaagattaccattccccacccatgcccctgcccccaccaaaaattaaagacaaaagaagtagagtttctctaaatgaaatgttttttgtaaagtctttccagagaagctgctaataacatgcaccgttgtttggcatatacttttatgatttagagaatgctcttttttctcaggacagaatgcacatccaatatcatgtgttgaaatacatccttcttcctcagaatcattttccttccctttaaaatgtggagcctgtttgttaggacagctttgattgcaagtgacagaaacccaactggaactggcttaaatacaaagggattgtatcataatggtcctgggctgtttcacaggaacaagggcagcaacctagagctgtgagaggaatgtgctcagcctcgggagcaactagattcaggggacacagtcagtccccaggtaggtgctctctccaacttttggatgtgtccctctttgtacagctgcattactcttctctctactgtgaatttatttgttctgtccctctggctcataaagtaaaatacagcctagataatttccaagatttatgtcctaaagcccagccaccaagaggagattagatgtttcagctccaaagtttccagagaaagactctacttgacttgctttatactgtcaactatggtcgtgaaataacatggtggatccctctataaccacgacagtgattgtagggcaaagtcctcagtaaaaaaggagatcattggtagtcaaaccatcattctctcttataaaagggttgggcctactaaccattaaggttccttccagctttagtagaccagcttgcattcgctggttgacttaggtgctgagttcaagggagccagtagttgtgtgtttcccaaacatggcggaaatctgccccagccaaaggcagagcctgccataatggaacctgaagcatccccagttaccaatgctgccaagtcccctctctcccaaggcttttcactcaatgagttgttacacatttaagcttacaaacagctcccttgggcacactgtaatacccaaccgaaaatcctgccacctgaggttgcctttgttctgagtcagaaattattgcctccaagatgggaaccatcggaatcaagagtaattaaaattccaaatcagtgctgtagagtgatactctttacctttatggattataaaatcaataaatctttagcaatatgggagccattcaccattcattcattcattcattcattcattctacaagtctttttacatccctactatgagcaaagtaccatctagattcaagtggtgcaaaattaaatactatgttattcctgcatttacagaactcagttctctgtttacatctgttgtggagacatatgtaagcaagtagttgtaatagtatacaaaagatacaaaaatagaattaaatggcatgatgaaaaaaattattgtgtccaaaaaaagggtatagagcttacacaagaattcataagagagatgatatctgaaatggttctgtagaagtgaaaaggagtttcccagggcaacctagaagaatagataattccaaacagagcatatgaatgggatttttctgaaaatcagaggcatcacaccaaggacatccaactagttggctgatgaagaatcctgctgcaaggaatcatgaatttctcatgtcagatttgtgttattctaggaagtttccttgctgtatcagttagagtaagccaaactgttgtaacagacatacagctgttgtaacacatgcatccccaaaatgtatggaggctaaagtacaatggaaaattatttctcattcgcatgacaattagctgacttctccaaaccatgccataatttgggtttcttccatctgtggctcctccatttcctaagtcctcacctctgtttttattcagttgatgttaagagaagagcatggtgaaagcgccccttcctcagcctttgtgcagagtgatacactgccgcctgcttccattcacgctttattgatgaaagttgatcatattcccacatttctctgtaaggaaagctcgaaatgtagtcccttcatgggcagccccttcaaactacaaccaaacgctatggaaatattgattttggtcaacagctagctacctctgccgtgcttacaatatgtatagaccatctataaaatatacatagctttcaaactactgacacaaaaatgagctacagtaagaacttgaaacagaggaggaaaagaaaacaaaccccaagcttttaaattcttactttaaaatgcttaaaacaagagttttatttcctttcaaatatacatttgtaaagaaattttaaagtggtagttggccatttttaagtgatcctgaatgtcatcatatttttacgttcctattttctttctgactgtacttgtggtataaccaagttcaatgtaatattaaaatagaaaaaacaaaaacatcagcatgtttcttaaacaacagcaagaaagtgcaattttattctaagcattccagtagctattaaataaatggtaggttactatgagagctattttaaaaggtcaaaaatatgaaagatctttttcttcattaacctattttttgtacgtttgaaccaatttgttctaaaatgaagtgaggttttatttttctaagttggtctttttaaaagttgttcatgcattttgacaaagcaattacatacttagtaattaatcccaaccaaaacatcaaaaaaagtgtatgactgcatttttctggatgctcatcctcatcatattgtttgcaatagtaaacagtcaagtttgcactaaaatgtccaaccatatagggtagattagttaagaggagcccagccagtaggatagccttgcatctcggtttactcctcctgtccccatgcacttggaattagcacccctgttttactctctgagtatctcagtttgaatgataaattatatgatcacattatatataatgaaatatgctgaatcctaaaaattcatcatgtttgagattccataataataagaaaaatgatttataatttgtcaatatatgtaaaatacagtttcctctctatggattcaaagcaattccaatcaaaatctagcaagttattttgtggatattaacaaactgattctcaagtttatgtggaaaagcaaaagacccagaatagccaaaaaaattatgaagaagaacagggttggaggagtgatgctactagatttcaacacataccgtaaaatcagtgatcaagacagtgtggtattgttgaagggaaagataaatagatccaaggaaccaaataaagagcccagaaacagacctccacaaacagaaccaactgatctctgacaaaggagcatagacaattcaatggagaaagataatcttttcaacaaatggtgctagaacaactggacagctgtatgacaaaaaaaaaaaaaaaaacctaacgtacaccttacatctttcacaaaaattaatgcagaatggatccaatcctcaatgtaaaagaaaacttctagaagataacatgagagaacacgtgggtaaccttggatttggtgatgagtttttctttaatgagacagagtcttgctctgtcacccaggctggagtgcagtggtgtgatcatagctcactgcaacctcaaactcctgggctcaagcaatcctcttgcctcagcctccctagctaggactacaggtgcatgtcaccactcccagctaatgtgaaaattttttgtagagacagagtctcactatgttgtgcaggctggtttcaaactcctggcctcaagccatcctcttgccttggcctcctaaactgttgggactacaggtgtgagccaccacgcctggcctggcgactttttagataccacaccaaaagcataatctctgaaagaaaaaattggtaagtgggacttcattaaaattaaatacttctactccacaaaaaaataccataaagagaataaaaagccacagaccagaacaaaatatttgcaaaatacgtatctgaaaaaggacttgtatctaacacatataaagaactcttaaaactcaacaataagaaagcaaataacccaatttaaaaatgggaagaaaacctgaatggacacctcaccaaagaaaatatacagatggcaaataagtatatgaaaatatccttcacatcatatgtcattagggaactgcagattaaaacaacagtgatggccaggcatggtggctcacgcctgtaatcccagcactttgggaggctgaggcggaaggatcacaaggtcaggagatcgagaccatcctggctaatatggtgaaaccccgtctctactaaaaatacaaaaaattacctgggtgtggtggcgggtgcctgtagtcccagctactggggaggctgaggcaggagaatggcatgaacgcaggaggcggagcttgcagtgagcagagatcttgccactgcactccagcctgggcaacagaacgagactccatctcaaaaaataccaaaacaaaacaaaacaaaaacaacaacaacagtgacatactacaacacaccttttagaatggttaaaatacaaaacaccgacagcgccaaaggatggcaaggatgcagagtgaaaggaatctgcattcattgctggtaggaatgggaagatggtacagccactttggaagaaagcttggcagtttctgataaagctaaacatggtcttaccatatgatccagcagtcgtgctccttggtgtttacccaaatgagttgaaaacttatgtccaaccagaaacctgtgcacaaatgttcatagcaggtttattcataaatgccaagacttagaagcaaccaaaacgttcttcaattggtgaacagataaacaaactgtcatacattcacgcaataggatattattctgaaaaaaattttaaatgaactaacaagccatgaaaaggtatggcagaagctcaaatgcatattgctaattgaaaaaatgccaatctgaaaagcttacacactgtataattccaactaaacaacattctgggaaaggcagaactgtagacagttttaaaaaatcagtgattgccggtggttttggggggaaagaggagggttgaataggtagaccacagagttttaggccagtgaatctattctgtatgatattgtatttgtgggttcatgacattgcgcatttgccaaaccctatagaactgcacaacacaaatactgaacctcaatgtaatctatagaatttagttaacagtgtatcgatattagttattggttcatcagttgtgacaaatgtactatgctaatgccagatgttaataataggagaaactgtgggaaaggggcacatgagaatgctatactttctgctcaatttttctgtacaggtaaaactgctctaaaatacaaagactattaattttttaaaatgcactttactatgcagcattattgtacaatctcttatttgttaaaatacatatggcaatatgggctcaggaaggaatctagaaaatacaaatcaaaatatgcactgtcctcttggtatgatagaattgcatgggagtttttttgcttatctgtaatttctaatttttaaatatgtatttcttaagttattaaatatatattaaagaggggagagtttctttgccttgagaatcaagttcttgacgcaaacccctaaatgttaactatgaccccatcaatgtgagcttaccatgttctaggcattttgcatgcagtagctgattcatctcctgaaagttagatcttttatgcccatttcacagatgcaaaaaccgagacacgaattaccttgctcaatgtcacaaacatctctgtaattttaagaaggacaggccaagcacacctttctccatttttggttctaggtagtccgctttacaggagtgtgtttaccagccttctgtgtgtgcctgggtatgtatacgagcacgttaatcgccacactactgaggtcttcaactcaactatagagaagagtcattttacctccctcaactcaagattaatgtccttcagtgggtgcaaaggaaggttgagcacatatcacataatcagagctggaaattagatgacattagcactaagcatttagctgaatggttcctacctaaaaacatgaaaatcaagtttttttttagataatacctcagccatgtgtcagcaacaggtactagcctcatattctggtttcgtatttctcattcatttgtatctagagtggccttacagatagcatcttgtcaaaggggaaaattgaatggacatgtttttctttgctccctatatgatctcaggcaggggaaataggttgtttgtgattttttaattattcgcacacagaggctgataaatattttataactatttgaaagactgttttatgagattttacttttaaaatgacatactggcatgattgtgagagggatgtggggtgtttgagctcttgaggccacccttgaccactgccttatttggattctcccaggagattctgagcagacctgaattcaggtgtgtctcagtcaactcaggctgccataacagaacaccgaagacagagtggcttataagcaacagaaatttatttctcagtctaggggctggaaagtccgcagttaaggtgtaggcagactctggttctggtgagggtcatagaagaccatgttctcaccgcgtcctcacatggcagaaggggagagggagctctccagggtgtctttgatgaagatacaatcccactcatgaggatggaacccgtgtgacctaatcacctgcgaaaggccccacctccaaatgccattgcattagggattagctttcaacctatgaatttgggagagcacaagcattctgtccacaacaaagggcaagtagcttacttggtaggtgatcccaggaaacaccgttggggagaggggaagtcaggcagggagaggaaggagccaattcatggtgcagtaggaatcaagccagctggagccctagaccttccagtggacaggccccttcccagtgagccaatctgcattaagaacatgctgtacttgggcatagcagctggttgaccgctcccacaccagggctgagggtcagccacagcttctctcttcctttctctgggtttcctgcttatcccgtcatgggacttccccagagatagaccctgagagaaggagagtgcagatattttctgcaggaggtgacaaggaaaacctggtggggagcagagaagtgagacaggccagggatgccagccagcaggggcatgtgtagcccaccaggcacactggggaactgatccacaagactccttgcagccctgtttgttgttagaggtggcaatgaggtctgcaggggtcgtgtggggccctggcagcctgtgccactctcctcttcctgcagaaggtgacttacgccttttgggagccacaggcactgtgcttgcagggagggcttggtgctccctcaggatgcagccctgtgtctctccacatgctctacttgcagaggcttttaaacagtgtccttccacgttcctccttcccacacaaaacaacactctgaatcgtgcatgccctgccctttcccattggcctcctctggtaaatttgggagattggatttctgaactcagaatggggacaggcatgggtggcacctgccttatcagaactctcttcaatatagagtccaagactcctaatttagaccctcctctgagcagcagggattctcatggctgctcatggataggtgggcccttggaaccaactactgtgtgtttaatctacagtattgatggagggagagactgaggaaccaactcaagccttcttcatgaagtgggtggggaggaaagacagacttaaaaatttattagcatctaatcctgttaagattttctccaccatatgccagcacaacaacccatttgaaatgtgtactaattacccctgttgtatcctgtgtgtacgctttctacgcagcccctgaccttttcgttaataactttgcgttgcattcgttgacctgaaacaaattgaattcagtggcactcactcaagaattgaattacatagtcttcttaattggtgtcttatttaaatgtgagaaagtaacggcttgccacctgtaatacgtttccaacaaaataaaattagaattctaatatttttccccattctagggaaaggtttggccatgaaaatatcattcttgtatgatctcaaaaataaaattctctgaatttttttcattgccaatgccgtgaaaactgcctatatagacacatattaattggagagatttatgcaaatcagctgggctaggaaggcttttcctggaagtggcccttaaaataggcggcaatctgtctccgttgccaacagttatactgcctttccctccccagctcttggatttcggattatgtgatttaatatacctccggctggcaaaataggaagcgttaagacaggaatatgttaagcatctgaagatattttccactgcatttgttagttttaagtccttgagccgcattgtctgttggttggagggggcagaaatctaatttcaggagtttagtgatgttctcctattgacggcttcacaggcaatagatactgcgggtaacattgttcttaacaccgttcactcatgtctttcctcggaggattcttgcaagcgatcgaacagataggagcagctggaaattttgggctttgctctctaattccagtgtgaaattaattgtcccaactgcaaagaacgacttactcctttacttactatatttaacttaaaaatgcaaatgttattagtggactgatcactgataagggtgcctttgtgcccggctttaacctctattagtgaggattatgaggacgtagccacattggcattttctaagtgtcaccgtgacagcacttgctgcacaaatgcctagctgtcaccgtgagttttatcactcagtttttccctccgaatgtagactaataagcccagaaattacaattgcctccctgccgaatctgtgataggcggaaataatgatatcagtgccctgctaatcttcttgcctctgcgcttggcactgtcctattgagtcacctgtcacactccgctttgatgaggcgaattcaatctccctgctgtaatgacaatggggccattttaatgtttggaaatgattatgtggaagcttcaccgtgctctgtcttggcaagcaaaccaaggcactgtgcacgccaggagagcgggctctggctgtcaggcaggcagtggagatgctgagttattattaggatttagacgtagaagtcggcttcattttgagcctttggtggtggccttgcaggagggaagaaggatggggaggggaaaggtgggatcactgctgcagaagcatagccattggctaatctcttagttgtctgcacaaatttgcctctagaagggtttcccaggccacctgtgttgttcaaggaggccagggtggctggagcttataaacaatcgtggtgacactaccaacatcatttgctggggcttttggtgtgtggattgtggatttcctcttcaggacattaactgaatcaaattactcttacaccaggcctgatctttcctggttctttgagaataacactgctgcagaacaaaaaaatacacataacttggaaaacactaggtgtcaatgaggatctggagcaaccagatcccactactgatgctgatttctaaaaccacctcagaaaagcagcagtctctactgaagccagacatatataaacccagcaaattttgtattgatacagaatattttacatatttataaagtgcatgtgagtatttgttacatgcatagaatgtcaaaaccagcaattttgttcctaggtagataaccaacagagatgcaagtgtgtatttgacaaaacacatgaactagaatgttcatagcagcatccttcatgataatgccaaactgtaattcgtccaaatgcccatcaacagtagaatgccttaggagttggtttttggtggaataccatacagtcatcggaatgaatgaactacaactgtgtggatggatctcataaacaggatgttggatgaaagaaaccaagcatgatagagtacatatgtaaagaattccaggttgggcacgttgactcatgactgtaatcccagcacttcgggaggctgaggcaggcagattgcctgaggtcgggagttcaagaccagcctgaccaacatgaagaaaccctgtgtctactaaaaatacaatatattagcctaaccgggcatggtggcgcatgcctgtaatcccagctactcagaaggctgagtcaggagactcacttgaacccaggaggtggaagttgcagtgaacagagatcgcgccattgcactccaacctgggcaacaagagtgaaactccatctcaaaaaaaaaagaaagaaaagaattccattaatagggactgtgaggcaggtaaaactgctctatggtgtgagaagctgggatcgtgattgcccttggtggaggtaaggactgggagaggacacatgaggagcttcttggggctggtaaaatgttctgctggtaaaatgttctgtctttgatctgggtgctggttatagtattgtatttggttttgaaaactttactgatttatgttcttttctgtgtgtacattacactttttaaaaaagattttaatttaatgtttttaaggcaatatatgaggcatctgtgtgttctgtctgcctcgatagcacaagggatgggagctaaacattgagcacacgtggccatacacatgggaacagtcatcactgtggactgctagaggcagaagagaaggagggggtatgggctgaaaaactacctatcaggtactacgctcactccctgggtgacaggatcagtacaccacacctcagcatcacacaacatacccatgtaacaagcctgcatatgtaccccctggatctaaaataaatgttgaaattttttaaaaaagtagtacaaggggactaaggacagaaaaatcacttcacagctggatgtcactagtggtctgctctgcttacagatgccaccaccataggggtgaagactcgggtgccccagggctgcttcccaaactcctacaaacatttcacaaattcttcctgccctgcctcaaatcgtagcttttctaatgcatttgccaaatcaagtcacgtgaatgaaaagacaccctttcagaattactacttatacatagcttccctatctgaacaataaagctcaaggaaagcatttttatctctggtaatcacatcccagagggacagcagcctgcagaacataaaactcgcagtctctaatccttccagaagggcagctcccaagctccctgttaatgtggggaaaaaaggtgtgcagaaacaagccatcattcatcggacaaagtcacgtgctaattggacttgattctgcaatgtaaattgcttggcttgtttccaaagaaaaatggagatgtccctggacgattaactagccttcaaactcactttctaccttcatttgttccttctggcagtctgttttgttcatcttatctgcccagacatagggtttattaaagttagtgttcactcaagaccatcctggctaacacagtgaaaccctgtctctactaaaaatacaaaaaaacaagccaggcttggtggcgggcgcctgtagtcccagctactcgggaggctgaggcaggagaatggcgtgaaccgggaaggcggagcttgcagttagccgagatcgcgccactgcactccagcctgggcgactgagtgagactccgtctcaaaaaataaaaataaaagtcaacagcatagtccggacgcggtggctcatgcctataatcccagcactttgaaaggccaaggcaggtggatcacctgaggtcaggagtttgagaccagcgtgaccaatatggtgaaaccccgtctctactaaaatgcaaaaattaaccggtcgtggtggcatgcacctgtagtcccagctactcaggaggctgagacaggaggatcgcttgaacctgggaggtggaggttgcagtgagccgagatcacaccattgcactccagccttggcgacagaacgagactccgtctcaaaaagaaaaaacagtcaacagcatacacatttttatcttgttacacaagactcttagcaggctcttcgtctttttaaaacatgaaaccagaacaatacttttgtttttgtttttaataataccaataagcatgataatatcaatgaatctacccaattctaaattattttcatggaaatagggttttctccactatctgctagcaatgtaatcttgggaaggttcttcaaactctctgaacttctgtttcctcatctgtgtaataggaaaaagaaaagtacctgccctaagggttactatgaggataaaaatgatataatccatgtaaagctctcagaatggagcctagtatatattggacacactgactaaatggtggctcctagaacattgacgattatgatgccatttctttgagcaacaggcttccattgcctggaaaacaaaacccacccttgactatgacagccaaagcactttgtgatctgatcgcacgcacagccctgagatctgtaatagatcagatccctccgcattttccaaacctgctctgtccctccctgtctccaccccttttccacaggcatctgtgatggaatttcctccttttcctccatctatttcttccaatttaaaaccaatgatttcttcaaggcacagtcaagaagctctttctttcataaaccctctgctcccttgggtaggtacctagaagcagacacacagtgggacttcatgagttttgttgcagatcaatagagctaccctgctgttacctgcatggtcccctgcatgtcccagcctcccttgttttgaccaataaaatgtgagcaaaaaccatgtgaacacttccaggatatggtcgtgaaaagcccatgctcagcccttctttccttcctgctacagcaacctcaggagccacagggttctaacgaggcagctacaagagggctgcgccgccatcacctcaggtccctgagtgagtggaggacagccccagattacctggagcaggtatccacacctttgttgcataaaccactgacatggtagtttggcgcagcagccgagcctagttagtacatcttcctcctccatgctcacagatccctcaggatctaccttaataggcactgtatttgtagcaactgggggatgtgtgtgtgtgcacacacatgtacctgcacgaactttcctcccaacaacgccgtatgcccctagatttagaaaagtcagcttcatcatggactctcccacagcacttatcatgtactggaactaagtgggagttcagaaatattggttgaatggattgtgcctcccttgtttctgaatgaagacaaactccaatgggtaaaggtgaagctttaagtgaggatatttttccctgtacataatactagcatgattattgtccagcttgaggaatgccttctctttcaataaaagagtcccctaagatagctcccagctagttgtgtgtgcagcagcaccacagagccccagggaggccagcttcccatgatgtgccaggctcctccttcccttttgagactgttctcagcctcagtggttgagacgtaagtaaccaagaacaataatttgcggcaagtttgtgaatttgaataggtaaatgctggcgggatttttttctgaatgcagctctccctggagtgacagcatgtgtgcatatgtgtgtggtgtgtctaattcctttcattagtaagtccacatgtgtcatggttaaatgggtacagatgatggatttctaccagagctaagcccaaggcatcatggtgccccaatgccagagcacatgtagctgctatctctttgtgcagactatggaatagagaggaagggaaattcctgcagtgcaggggacatttgtgtaccttcagtttatttctgttcttcactgcttgcaactacaacctctttatacataaaataatcgcttgtagtgatggccagtctttcatttaaatttccaaaaaactcagagagagactgtttcaggttctttagagaaccttatgctagcctgattattttgtctgacttgacaaatgaataagtgagagattgaaaagagtgaggcctggtttgattgaattaactgtgagtttatttatttggtggacaaattgtccacagatccagctataatcttggtctaagaaacccctaaagaaaacaaaacatcaattgggttaacttcaaagagatttggtttaaacaagacattttaaaaagtattatatatcttagagagaaaagaggtgaaataaacaaaaagaaaagatgttcttcgtgggaacttaaatttccagatatcactaaaacaatcaaaacagcaaaaatgagtattagtgaagattgagtcattttggcgcttactatgaaaagtgaaaaatatgttcttggaggggaaggagactagtacagagtccattctgaggaggaaaaaggggttccccagtaggtctggataaaggactgttgtttgcagccttctgcacacaccgaaacctttgtagagaagaatttgtgctgggaatgaagaatgtcaacggtgtccttggaaatgcttatgcttccaaaggtgaatgtgtctcactgccaagtgatgtatcccacaatggggtttgcaaatggggtcccaaacgaagcttgagggtatgtggagaaaatatggctcccaggacaaaccgcacatttaaaatacacacccaaacaacaaaagtggtgcctacaggagtgagattctaagtctttgcggagtagagacgctgtaaaccaaccagcatggccatgttagcaggttcctgtgaacggagtgtctacaaggtttctactccttaaaaaaagttcaccagtgattcatgaacgtggtagataagctagaaattgcagggatctgaaaagcaagataggtcacttctcctccgttcacaggctaatgaaggcatctttagagccttactttgtgcactgcatgagaagctggaatcttaataataaacatgtgccagatgatcaaggattctcggccatcaaccaaatgcatgcctgtttttggaggcagcaattttgatagccctcttcatatttccagagacttgggagcagcaaagagggctcctagagaaaggtgttaagtgagcttaatagctccttactgcagagtaggttagcatatgcccttcaaaagttaatgaccctactcatgtgtcatcagcacacgatgtctgactccctgactctctttaggtgctcagcatactcagagcttgagcaaagaagacaccgaggagtgctttagcagatacataaaggcacaacacatttttctgttactcggacatacttttttgtattttaatatacgtagatatgtctagtttaaatgagttttgttgtttattttgaaatcttgagtaatcttaaaaagaaattctttcttgttccttttcagaggaagcttacaaacacatatgcatagcttataaaacaaggacattttctcctctaagaacaacagctatattggggcaggttccccagaagcagacccagagactgtattcctaaacaggtattttcttatgaaagtgctcctagggaagacaggaaggggataggaaaagattaaaaggaaaattttaaaaagccaagcaagagagtggtcttaagcaaagtcctgcatgaggataacctgagcctcctctcacaggggaactccagagcctagattacacctcacagttatctcaacctgaagcaaagattcaaagcacctcaaagccagaggaagaccctcccaagagaagggaaaaggtatctgaggagatataggcaaagtgctagcagaatcttctaaaggtagaaaactttaaggggcatgtgacataaggagaaagaagaaaaaagtattaaaaagtgggagaaagtataagaaggggaacaattaaatattcttttcaaaaatcaggacaaaactcaaaacatcacaggggacaggtagtattgttagactcattatgaagttggggaggcagcctccaacatggccccaaacacccttgtattaatcagggttccctagagggacagaactaataggatacatagatacataaaggggagtatattaagtattaacttacacaatcacaaggtcccacaataggctgtctgcaagcttgaagagcaaggagagccagtccaagtctcaaaactgaagaacttggagtccagtgttttagggcaggaagcatccagcatgggagaaagacgtaggctgggaggctaggaccatctcaccttttcacgtttttctgcctcctttatattggctggcagctgattagattgtgcccaccagattaagagtggatctgtcttccttagcccactgactcaaatgttaatctcctttggcaacactctcacagatacacccaggttcaatactttgcacccttcaatccaatcaagttgacactcagtattaaccatcacaaccctcctgtcctgggattcacacccttgtgtaggctcttcccacagtgaatcacggttggtttgtgtagccaatagaatatggcagaggtgatggtgtgtcacttctgctgactaggttccaaaagataaattggcttctgactgttcttttctggattgcttgattggggggaagcctgctgccatgttaaagaactcaggcagccctatggaaggtgaggaactgaggccaccaggcaacagctgtgtgagtgagctgttggaaacagattgtccagcccccaccaagccttcaggagacctcagcctctgccaacatcttgactgcagtctctagagagaccgtaagccagagccacccagctcagccactctcaaatgtttggcccccagaaaagatgtgagataataaatagtaggtgttttaagtcagtaagtttgggagtaatctgttatgcagcaatagacaactagtgcagaaagcatgttttcaaagcatgagtctgtatacctgtgggtggtaccaaatgctggggtccaggcagatccagacattaaaccaagaaggaagtccagaactaggccagggtgaaaatacagggctcagcacagatggcaaagtcaacaaccaagcagcccatgaggggctggaaaaattccccatgctgttgagtagattccatgccccaaatggggacagaactggctccaggtggttaaaggaaccagaagtaaataaaaaacaaaaaaaaaacacttagattttcattataaatcattaaaataaaacttcgcctaaggtaacttcaattatctagaaattcatttttagagaacactattggttgtccattcaacagctatccagccctcttttccatgatggcagagcccacctgctacttaagagactataatgatgagctattctctttccctgcctccttgtagctaagtcatggccagtggaacccaaggggcagtctgcaaacggggtttttggaaagacttttcataaaaagagcaccacgtaggacaaaatgctctgttgtgcccacctctggatcttttatttgatttttaaatttttttgtgggtagatagtaggtgtatatatttatgggttatgtggatatatatttatgggttatgtagatatttttatacttgcaggtaatgtgttataatcacatcagggtaaataggctatccatcgccttaagcatttatcatttgtgtttcaaacaatccaattatactcttagttatttttaaatgtacaattaaatttgtttttactatagtcgccctgttgtgctagcaaataccaggtctcatatatgctttctaactatttttggtacccattaaccatccccacttccccacctcccactccccgccaccccgcctttggatctcgaatgagaatatgctgtttgggtttgcagcagctgtcttgctatctgaggagaaagtaaaaatgtccacagaggagctgactcagggccctgacatctgcgagcagctgaatgaatggaccccagaacaagctgcctccagacttgctgtcggaaagaaaactcaacatcattttagtgggatattccgtcacttgccaccagatagatctgttgctgtatagcaaacaatcctaaaattgtcacttaaaagaaaaataagcgtttattttactcatgaatctggtggttgaatggcttagctgggtgatacttgcatgggtttctcatgtggttgcaattagatgctggctgcgcatagagtcattttgaaggtgtttttactcatatgcctggcacctgggctgagaaggctcagcagctcagggtaggaagacctgggggcaggaagacctggggttccccagtcacctctctctgtctctatcctacccgtcatctatctatctatcatatatgtctatcctatctgccatatgtctatcgtatctatcctatcacatatatctattctatctatctacctatcaatcacctatcagctatctgtcatccatgtatcctatctatctattatccatctatgtctatctatctagtggcctcagggaaatcaggtgggacctcttacatggcagccaaaggcctccagagagaatgtttccaaagaaaagacaaggcgttttctaacccagccttggaagtcacacagtctcactttccccaaattctattcatcatgtagttacaaaggtgggcccttccttcaaagggaggggatatagacttcacctcttgataggaggagtttcaaataattttcggatgagtttttaagccaccacaagcaacctaactggtacttttgggtcctactgtttattcctccacgtgatgacttcccacattatccttaccgggagagctagtctcctcttcagaacccttataaactttccatcccagagaaacttttctagggcccaagatggtacccaactctggggtgactccttcccgttaacaggataaggcttctgagacagtgacctgaaggaataagctgtcccttataaggccaagatgattcattgaaaagggagagtattttaataactaatggtttatacttggtgccactgcatagtagaatttgtgtttctcttaacctttcttgctagctgggaagctaagagtatattggataccagttgtaactctgttgtgatttgggtccccccacccaacacaaagcagactctaaattgaggaattgggcgcaagtggtttattcgtcaaatgcttccagaaagcactatgagggaacagggaggggaggcagggaagggcaaaaagctaacataaactgtgttaatgaacaggttatcacagggcaacctgggactgggtagagccatgcctggctgccccactgtggtcaaggaagcttgggtccttgtccaccatctcctgtccttcactggttgggggtcactcctgggagcacttaatagcacttctgggctgccccacctagagagtcacagaaagccatcagcatgtacaggactatctactggagacctccagggcaagccaaggagatatggcagggcactcacagtatctcaaccaccagctcccagtacaaatatccctctcccgtctctaccatggcagactttccaccacctcaaattcttttttagaagtaggcagagtacccattatttttcaaaaacaagattcattcattagggtttgtcacatattacactggagtgtatttaagaagtgaaccttggatttgtgtaatggaggagccgcggtgcgtctcagctgattatgattcaagctgatcaaaagaatgcaggagggaaaagtgctcacctccagtagacccctggtgctcattgactcattaaccagaaactgatgattcagatctcctgcttctcctcccacccctacgagctgctcgcctttttccctttcactgctcattagcacccatggcaaaggcgcaatggtgggatcagaaccacggaagttcttttttttctatagattcaggtctgcctgaatgaagtttaaaccagtaacagagaatataagtttttcatgtttttattgtggtaaaatgtaaaacataaactttaccatcttaacttttttgagtgtacagttcagtggcattcagtgccgtcacattgttgtgcaatcatcaccaccatcacctccagaactttttcaacagattggagaatttgggttgtctctgaagtttgttttttcatcatgtctctgtcctgcatttatctagaaattcaagggttggccagattaagtaaaatgtcacttctggagagctaataaaaaaggtttttttataaaaattatttatttttatatatttagggcatagaagtgcagatttcttacatgcatatattgcctagtggaaaagtctgggcttctagtgaacccattgcccaaatagtgagctttgtatcacacaggtagtttttcaaccctcaccccttcaacccttcccccatcatctattatgtcactctgtatgcccaagtgtagacattgtttagctcctgcttataagtgagaatttgcagtattagactttccgtttctgagttatttcactgagggtaatggcttccagttttatccttgtggctgcaaaacacacaatttcattctttttatggctgagtagtattccatgctctctttctctctagatatagatatagataaagatatatagctttttaatatctgatatcaaaggtactaaaaataatggacacttttggtatatatgtatgtgtttgtgtgtgtgtgtatatatatatatatttaccacaatttaagagttggctggatttagtaaaatatcacttctggagagctaataaaaaagttcctttttataaaaattatttatttttatattatatgtaaagtttataatatataatttatatatttaatatatattaattctttattatatactatatattatatatttatttaatttatatataatatataatatacatatataatatattataattatatattatatatattttataatatatttataattaagtatatatattatatattacatatataatatatattataattacatatatattatatattatatgtatattatatattatacatatattatatgtataatataagaaatatatgtgtaatatatattatgcatatattatataatacatatttataattataagtatataattaatataaattataaatttataatatattttatatagttatataacatagttatataacatatatataacttatattatgtataaaatatataccaaaatgtgggtatgtatacaccaaaaatgttcattatttttagtacctttgaaatcagatattaaaaaacaaagatgtatcatttagctattgctgtaataaaccattgctataatggtttaaaacaatgatcatttatttagtcactatcctaaggaagggcaatttgggctgggctcatttgggcaattctgcctatttggaccagacacagttgaccttggctgggcatgctctgctgtcagttgccagggtggctggagactgcctggtgtagggtggctcagctgggatggcttgtctctgctccatgggggttctcatcctccagcaagcttatcgatatggtggctgagcaggacctcaaaagcagcaagagggccaatgctcaagagcttttcatgtctctgctcacatcacatttgctactgtccttttgaccaaagcaagttacatgatctagcctagagtctatgtaagagggaactaccaaaaggcatgtatatagagaggaatgaacaaacttggaccatatctgtaatgaatccaccatagatattatcctttctgaggctataattctatatgaagataacagttcttctgagattgcttaacatcctaggccctctgtgatgcccaaacattctcaagagttgaatgttacattgtgtaactcacataattgggcctcagttatgaccctagcagcatttggccatctttataatccacaaaaccacagaatctaaatcatttttttttcctctgactcagccaggtggaaatctaattggccattgtggtttgtgttacctcttctgatggtcatcttgtatcatgtcttctgctcctgagaaatttgagaggggttggaagaggtttgtgccactgaagagggaaaactaagggagagagaaaactgggcagaattggattggcttccctcttctttttttttttttttttttttttttttttgtgacggagtttcactcttgttgcccaggttggagtgcaatgacacaatcttggcaaactgcaacctccccctcctaggttcaaacgattctcctgtctcagcctcccaagtagctgggattacaggcccgagccaccatgcctggctaatgttttgtatttttagtagagacggggtttcaccatatttgccaggctggtctcgaactcctgacctcaggtggtccacctgcctcagcctcccaagtgctgggattacaggcgtgagccaccgcaccccgccccctcttccatttttaaacatctgctcccatccccaatccatactaggttctccccagtggagtggggcctattttggtttaatgatccttcctatttaaagtgttctgaaataaaagagtaaatatactctgtttcttacatcagaatttgaggaaatgaaaaatatgactatttttattatttggatcaataaatctgcaataaattgagaaacccataacaacagattaaaggtgtcaaatacatctattttttattattattagttttatttcatagaaataatactatctcctagcagtaaattccctgttcttcttaccccagagctctagtctccagtcacctgcccaatatgcacccccattactagtttcttatatcctgtatgcttatacacacaaacatatgtacatgtgtgttacacgtaaatggacactccccaattaatgattttttgacttcacaatggtatgaaagcaatacatgttcagtggaagccatacttggagtacccatacaactattctgttcttcactttcagtacagtattcaataagttacatgagatattcaacactttattataaaataggctttgtgttagaagattttgcccaactgtaggctaatgtaagtgttctgagcacatttaaggtagtctagctaggttagactacgatatttgctagattcggtgtatcaagtgcatttgcaacttatggtattttcaattaatcatgggtttttgggacatcatctcaagttgaggagcatctgtgtagtagattaaaccatatgaaattgccgctgtggaaacatgtttgatctataaaagtagcaatgtcatatcaatcaatctaatatttttaaataaataagagtctaaccaataaactggtctgcatcttggggtttttttgtttgtttttggagacaaggtctcactccatctctcaggatagaatgcagtggcgccatcatagctcactgcaggcttcaactcctggggtcgagtgatcctccggccttaagcctcccaagtagctgggactacaggtattcaccaccatgcccagctaatttttaaattttttatagagatggggtctcactgtgtttcccaggctggtcttgaactcctggcctcaagcgatcctcccaactcagcctcccaagtgctggaattacaggtatgatcacagtgcccagccaggattttttacttaccgatatatcttggagatcattctacatgagcacatagagcttgatattattcttatctatgattgcctaggtagggctgcagtttatttaaccattccctcttggatgtacacttatgcttctttccagttttcattattacaaatataataatgaaatgaaaatataataatgaatgtcccactgagcatttgaacctgggcatctgcagacaggcggccgggcatatgccagaccagtccactgtcttcctgcctcatggtcctctggctccccaaatggttcaagccatgaaggaaccccgtagccattggcttatgtgttacaagactggtggactgatatttataagggacgctggcaacaccaaccaaagtctttgctcttcccgctgccctcttaaattggtttgacgataaaatcagaaggatttggacatcccgcaaactttccctctgtgggcagaagtctctcctgtctggaggcccttcagtgagaagagatactagtttttcagacagtcctggtttcagtttttgactctgccattcagtagctgtgtgaccttgggcaacttactcaccctctctgaatttcactttcctccgctataaaatagtgtaagattctgaagtgaaacgatgcacctgccacatagtaggccatcaagaaaaaaatgaccatttgctccttaaacgaacctcgtttccatcatcaaaacacttagtgctttcctgggagagccaggcccatgttgtgtctaaggaactgttaaaaagacagtcttctacaagccctccctgctctctggctcgctacaggcagcatttgttttctgatctcagcaatagcaacggattgtgattcctcccatctgaattctggccccatccttggcacagagagattggcctgaaggttttattcataaataattaaaagccagaaggcaagacaacaacatattattcccgtgacccttgtgttaatagcatcaccagatgatgtctcatttcctcacctctagctcagtccagatgatctgtagacatatatggtttttttgttgttgtttgtttgattgttgttttttgtttttgttttttgagatggagcctcactctatcacccaggctggagtgcagtggcgtgatcttgactcactgcaacctccacctcccgagttcaagcgattcttctgcctcagcttcccaagtagctgagactacaggtgtgcaccaccgtgcccagctaatttttgtattttttgtagagatgaggtttcaccatgttggccaggctggtctcgaactcctgacctcaggtgatccgctccccccgtggcctcccaaagtgttgggatttcgcctcagcctggacatgtaagttatccaccacctcagccatcccagctgtagcgtattgcaataaggaggaattagcgggtcagggatggaaagggaatcaactgtccctaaaaggaaaaactgttttctctactgatacaacacttctgagagcaaatttgtgggttttctacaccaagcagtgtgccaattctctgcagacactaactgggtgtcccacaatttaattctgacactaatgacccagagtcagcacaaaccccacagtgaagagctcagttccaccaaactgccccccacttcagatgccaactccaagtaattgatacccaggttacccacagttctgtccatcttagctacaagttgaaggttcccatgactccttcctcaggttcgatgacttgctgtaatggctcaaagaacttaggaaaacactttatttatatttactggtttatcataaaggatataaatgaacaaccagatgaagagatctataaggcaaagtatagggaaggggctcagggcttccatgccctctccaggtgcatcaccctcctgggaccaacccaggagctctccaaaccccagtgttcatgtttcttatgaaggcatcattacacatgcatgtttgattaaattgttgactattggttattaaactcaatctctagcccttctcccttccatggaggttgaaggataggactgaaagttccaaccctctaatcacatgatgggttcctctgacaacgactcccatcctgaagccatctagggccccaccaagagtcaccccattagcataaactcagatatggctgaaaggggcttgttatgaaaaggacacttctctcaccccactcattcagaaaattccaaggattttagaagctctgttttcaggcacaaaaaaacaaatattataacaaaagttgctcctatcaccccagtcactcaggaagttacaaaggtttccgaagctctgtgccaggaaccagtggggagagacctaatatatgtttcttattatgccataggccctgacactatgcttttatttattgattttagaataatgtttttatcttgactttttaaatacatgctcattatgaaatattcaagtgatgcctaaaagtacaaagaaaaagagcaaaacctttctgactagaaatcatgattttcagcatttggtgagcaccatcccggacctctgtgtttgactcacacaactcaaatgagcaaaatatagataggaagtcaactagggggaaaagatcatgttaaatatcctattcatttacttgctcattttttgttttccagacctcccaccccaaactctacactggaaaagtccatgagggcaggaactttagttatcttgttcatcatggaaccctctgagcctagtgcagtgcctggcatttagtaggctctcaaaaaatatttgttaaatgttgaaatgtttctacttagaagggaacatttgtgcacacctgtggttccagctactcaggaggctgaggcaggaggattgtttgagtccaggagttcaaggttgcagtgagctatgatcccgccattatgctccagcctggacaacacagcaagatgctgtctctaaaacatatttctttatttgaaattttttttttacaaaatatttcttcctagatgttcttatgattctttctttaaccttggagttcaatggcttccccaagatatatctcagtgttgatcatcgtatataatcttttcctggggcactttgttttatcaatgtttccttattttagtaaagttcgcatatattagatctttgagtagttcattccattttcctgttctctttttcagaaacagtaatcatggatatgagggtctcctttgtcttccatatctatcatcttctttgcaattgttgtttatgttgactttaccatttcgttttgtgcaataacctcaaggctgactttatcttcaggtatattcccccatatcccttaatttccttatcacaaggacgcatcctatcgcaggtcttgtgtcccggactactgttgctaatagcaaagctcttcggggtacacaccttcagggctgtgagcaggctctgattgtccttccccacccctcccctcgcttcctctctggaagttttccttgactaggagaccaggtcacaagcaatagaaacagacccacatggccactgcttttttagccaccccttcatccctgacctcgctataagcagtggacaaaggacattctcatctctcccctggcccgcccatgaaactggatcttgaccctttaagaatccttggatatgtttttcttgatgtggagaaatgcttttggagaggtacttacactactcaggtttgtggcagcatgtgtgctcttggcctcgatttccttatgtttgccaggaatgtggcggtttgtggtgtgatgctgtggcagtttctacttcattgatgatggattatgttccctctatcttttgtccttttgctgatgtaggcggagtatgaaagaggagcagagcaaagatgctacaatgctactgttggtaggtataaagacttggcccagatgaaagagatttttgcactggggattacaggtctggaaccagcggaatgcctacgatgctctcacttctcaagtttgccctcccagccatgtccatggtgaagaacactgcttaatgcatacaccacatgcctccctaatgacatttcccactgtcatgctgcatcttacctctgttgtaataagagttatttgacccccatggcataggccaagtacccatgagcttttatgcttcttgagagtcataggtgtcctggtgattcgcagccatgggcaggtgcccctaaaagaataagtagcattcatttctcaagatatagcagcttccagtcttcctgtcacaggaaaggagaaattggcttggtgagggaatatccatacagtagtccccaactatccagttggctgccttgaaatactgctgtgggagaggctggagaaaaggtgaaggagtagctgatgcccccaggttgatagaagacagctcttttttcctcccccacccacaaacttccctcttgctgtgaagtcagaggcagaagctattccagggacaagctgcacatccaaagcattccgagtttgcttccttacgcaccctgattccaattcctgcccctgcatgttgtctgcttcccatcaccttttcttcaatgtgtaaaaccttagtaaagtattaccagttattatccatgggcaattcacttgtctatattgcctgtagaatgtcatatcaaccttgatctttcagttcattatcaagttctgacagattggttttaaagaaccaattccatgggctggagtcagggcactgccaatttctgaatggctaaatttcctgtgacccatccgttcaaacatcacctggggatgcccttttacaacagaggaggttgagatagccacagttcaatgaattaacaatgctagagtttgcacgctttctgtggtttgtattagctttaaatatctggcaatgtccagttcaatggacattggccacatgacagtgatgtcccttatgcacacatttggagcatcctttcttcaaactgtactcatgtgaacaaattacaaagaatcttggtgggagtccaagacagcgtgaattatgctatcttgaggcccttgcttaagcaaggatattgctttgtttgcctaatgtgatcttaaaacatgcctgcaaattttttgacactcatcccttcgaaaaatgtggagtttaattctcctcctataaaatatgaactggccttttggactcacttctaatgaataaaatgcagcagaagtgtctctgagtgacttctgagctaggtcacaatgggttcagcttccacctgacaggccccactctcagaactcagccaccatgttgtaaggaagcccaggcaagtggagtggtcacaggcaggtgttccagccaacagccccagctgaggtccagcccacagccagcatcaaccatccgaggtgtgagtaagcagtcttttcatgaattagcccccagcctctgagctgccgcagttaacaccacgtacagcatggatgagctacctctgcagtactagtcagccagggctgccataacaaagaaccacagattgggtggcttaaacaacagaaatttattttctcacagttcaggaggccagaaattgaagatcaaagtatctgctggaattggtcctctctggggactggaagggaaggattggctccaagtgtctctccttggcttgagatggctgtcttctctcagtgtgtctttatgtcaccctctgtcattgcctatgtctgaattttctcttcttataaggatgccagtaatattggactagggctcaccctaattaatgaccttgttttcactaactcatctctgtctctaaacacagattctgacacactgcaggttaggacttcagcatgaatttattcaagggacacaagtcagcttgtaacacctgctaagcctccacccacattgcagactcatgtgcaaaataaatgtgctggtgttttgagccactaaaatttgaagtggtttatttacacaacaaaaacacaacgatatgcctaaggtacttgacttagagactcaggttctggtgactatctcagaatttattcagcaaacaccctctgacatcaggactataccatttggggtggttctcaaagaacccaggccaggccacatgcaaaacacttgggagggagctgcaggactgcatattcaatgctatctgtgttctgttttaatattgttccttgattgcaagaaatgggatccactgaggctgtctccagaaactttctttcaggaaaagttattccttaaaataactttttagggaaaaagttatcatagggatgttctggaacagaagagggatgcagtcaggaacaaatctaaggccagaaatggaatatgtctataggaaatagagttgcacctctcagcagttgactttgggacctgttctggatgcagggagttctgcggcttttaatataggggaaacatagtattaagagcacccttttggagccagacagcctgtcaaagcctggctccaccaggtactaacagtgttgttctggaaaagttatttaatgtctccatgcttctgcttccttatctgttaaaatggacaatccagtacctattacatgaagttgtaatctaggatcatttatatgatgggttaactatttatgtatgtattatacgacttgcaaggaatgaatttcactgctgactcttctctctccacctggcttcctttagtgacccagagttactgctcctccattacttcggcttgtacagcaaattcattcattgattcagcaaatgtttacttggcacctaatgtgtgctaggtgctattttaagccctggggttgcagcgttgggtcaatgagataaatcaatcaattgggcattgtgtcagtcattcaaatatgcttgacctcatcaaccttgattctatcatgctcttctcagctaaagttctactttactttatgaacttctagcagatgctcccgccattcaggggcaccttttccctgcttcttagctcagatccttggaaaaagccctctggcccagcttatcttttcaaatcaagtcacaaaatatttttgacccactttctgattggtttcctaggatcaggtggtcactcatccaaccaactgtattctaggatgggagatggatccaggacccaacccacatggacagcagggctgtggggcaatcacatgatgggcagctttggtgggaggccttagcgcagtactttaaggatgagggagcccaccatggactcctgtgggagcttggagtgctccaaagaatcctttagtcaatttcataccacacaggcccaaggagggtacatgacttctggaagtcacacacagcctgttagtgacacgctgggtatggagccaggtgtgagcatcttgtatgagcaccttgtatgtgtgagttcagcctgcctggtgtggccgaggcagtcggtgccccttccgtttcctctggacattcactattctcgtgtgagccagcaacttcagagagagctttctctggctgaagaggtatacttggcctctcaactaaagacaaacaaaatctgggggtacataccccagcttccacaccccttgggtaggacaagtctgagacgtgtcccacattacctcccagaggtccccagcaggactgagcctcagttgcccacacctgtaaactgctccttatgcaaacatattgatttcttcccttccctatctcacttgcactctcctccacctgtactttctgcagtcacctgtcaaataaaccactcaacaccttgcactcaacacctttctgagggtctgcttctggagaaacacaggcaaagatgccttccaagtaaagcaagtggcaaggccatgttaataagagagaaaaaacgaggcatggggaaaatgcctggatagagagacacacagatgcagatacctgcaatgttggtcttatggaaaccatcagatgcaatgggaggctacttgccatagtctggagctacagagaaaagcaggctgcagatggcaaggtggagccatcgtgggaggagttgcttgtagacaggacgcctaaccagctattcttaaaatgttgcattcttccattttaatctcactcattattgaatcattagtaatgatttatatgacattgacttttttcagaaatcttgactaactctttgacaagagattaataaagagtgggacttcagatgtcaagtttttatgagcaaaagtgtccaaggccatctctagatgggtattcttggctgtattcaccacgctctccagagactgaaaagcaattgtttagctgggtagaggagctgagctgaattaaattgacctgcatgatacagaaagtagcactgagcacatttaactaaggagtctttgaaagaaatctattttatcgtagctgactgctgaaattattttaaggaagtgattatcaatctaataatttaaaacgcatgaatgatgtcagcatccaaaattaaggcagactgggagaacaacgtgcctgctctcgagtaaaaagctaaatgcatctttatttctttctgctttttttcctcttttcagaaacatgaatttgactgctttcaaaagccaattgttatgcctacatcctgaaaagggagatgaaatttccatttatagtagaataccagcagcctcacttaatccagatacacatatacctaaaagcacttttgttccaaatataattattactctgcgggaaaatctggtatgaatctcttggtttggtggagttttaagcctgtctttaatttaaaataactttattagaacccctagagatgagagtggacacagtagggaaaggtagttatcatgatgagaaaaccagggatgctggaattccttcattgcaggcttctggctggagttattaactcagctatggagtctgagcgctctcaccacttgggtaatgaatgaataaatgagtgtttaaaagccctctgagcctgctaggcctgccccagtgtgcatatatgactctcagagcattgtggccatggtccgagcaaagctaaatcctttcgtgaaaaggttccctcttatgggcttctgccaaagccagtgttcgctaggaaaggcagcaattttttttctcctcttcaaagggacctttatgtactaactcactcccacctactgtgcatgtaaattattcatcagtgatatggcctctatttatgactttgatcctttccttcccccggatgcccgaggagcatgataagacgggtgagttatcagagtggctttgatctcctgctcgcaaatggtattttgtggtggaacatctgagccccctctgtagctgcagggtgggtcgaagctgagcagagtttggggtttgtaagatgtccatctcctagcattaaaccgtcttcgggacaaaatgggatgggacagaaacgagcctatttctcccccaaaggagcaactattcacacacaatgattcacaggcacccacaactgctctcgcagcaggcaggacagtgccatgataactcgaaggtgcaattctcatccagaacttctttcaaaagaatcacaccacctaggcctcatgcaatggtgttccaggataaataagtcacttggggagaaaacaatagaatcatgagggatgggaccctcaaaattgtttgctccgtctcacatggtaaaaataagcttttccttgtaaaagggggtaaaatgtagggcatacagaatgctggaaggaggagggaacctccacacttctcagagccctgagatgatcgttccccgcagtttgtcatcaaactattagtgactgccgattgtgtctggcattgaatcttcggcgcgctcacagtatagagaccaaggacggtggactctctttcataatggcagtgtaaaccactttgcattaagtaggaataataacctttttttaaagaatgtgtcaaaataattacatttcttgttgctttcctttcttccacatcacatgagcaagcacatcagcctcacttgaacagatgaaagaaggacgttttttcagtgagggctgttctaagaggaacacaggaccaacagtgagagggcctccattccgtcatggctgactgggattttaggcactgcatgagctaattctagccaacattgtggatttggttatacctcttctttctcaggtgactaggaagccatactgtcaggaatatttgccctgcgaatgtcccgtatgatgtctgcaatgttgcagatactcctgccactagcaaattccctctactgtgttatttttcctttactaaaggtgatatcctccgaaacattcactctttaactcagaagccgaactttaaaaggggacttagtagtagctcggatgtaggtttcattattttgtgaagaattttgttcaaatgcatttgaaaatcatttttagaatttcagaataaagtccattcatgtttttcaatggtgcattcacaatacaacagatttgagcttggtgtggcctgttttgatgcaggttacctggttggcttagtttaaaattgatatcacaagtgccttaaagcgcatttcatcaaatgtttatatctaatgagatatttaggggacagatcattttttatatcttgaatggcctggtgtacaaaaatcacctcatcttcataaggaaggagaatcattctaatttgctaaagggggaacaaattattgatatcttctcatgttttctaatagtatgttagcaataaatagccttgatgttccagaaagcaaaaatctctgagctgagggaaaacaattctaccctgccgcgcgcgcgcacacacacacacacacacactcacactcactcacacacactctctcacgctcacatgcaccttcagtttttcccttgctgtccccccatatgggaggaagagaagatgtctccagaagtgtgagcagagtaagtaaacatggagagtttgtgatgctttggtgacaattacctctcctttctgcttctggctgctgtggttccagatggtggaaacgttccgtccgattcttccctcatattgtgcgtgctcaagccacaatacctagaatcctgagcattgtaagtgtttagtaaacacctgcttccaaacagtgggtagatatctccaagatgtgcccacagcccctgcccagccccctttctctgccctcctggggagcctgattctatgggcagcgcctggcgtttgtttgcttgaaagccctgactgatggggttagacaattatgaccttggttcctaaagagcaaagtgcttgcttggaatgttgaattccgtgctggggcagggggccttagataatgagtgaaatacctcggtcccttcatccccaccaccactacccacctcttcccagtctcagaaaaatgcctcccacagccagcttccacagggcgactgcatcgagttttcatcctgtccgccttgttagactacacgcgcggtgggggcatcggatgatgcagcgtggctgctgtcgttttggcaatgctgttgccggggggcaggcccctggcccccagcttggattcgcagaccccacggggccgccttggatgtgcagacacagcagcgcgtgcgcgctcagcgggcagagctttgtgccccgggcctcctgggacgaggctgcaaaccttcagatcccagcacagaccccccggcttccctctgcccgcaaacttctcctaattaagccagtccatctaattacggggtgttccatcaaatatttctccagatgcttccgatgcagcctgcgggcgctggtcaaagctggcgaggcttgtgatcagggctgccggccctgcgagggccgcgcgcgttcccctctctcctggacgtgcctgtctccaatactgcacaatccgccctcactcatttgctccgttgcctgtcgaaagcacagagcgtaattactaaagttaagaaaacatccctgtaattagccaggcaactctaagcacaagaaatggaaattagtcacagtaccataaattagtttgtgcatacattacgttcaaggatcgcccttggggccctgtgtttgcagtctttggcgagcaaccccccgtatctcaataaagcattccttcccgggtgagtatgtcgcaagaaggggagtttggcttggattacaaattttttaattctttcgtagacagcagccagaataaagtctaatattccggctggggaaacagacacaagcaaacagtgattttttttttcctgttgattttattttcctttgtgggcatctgttaacctagggccatcaaggtgtctccaaacagtgggctcatcaattgcattgtttcactcattaggagcagtagttataaactctttaaataaccctgattttcaactattttcacagtcactcctcttgctagcaaaagccaggaaattggactcagctacacacaacatagcatttgcatcaaaataatacagcaggcaacagcaagccacaatcacatcactcagaaggaaggaatagaatacaaattaaaggaagaatgtaaattttttgccattaagcttcaatgaccatttgaaatggtggaaggcacaaaggttcttgatgagcgtcatctagtttgattattcatacttgtgtttctgcttgaattaaagcaggagtgctagagcccgttaagggaaaatatttgaattgatagtgaactctcaccttgccgtgcatccatttacttttcaaatgaataccagataagttagtgcattttctaatcggcctgttttccagtgagtgctgtcattacataccaatttcttttagaagtgcttgctaagaaacattaactactcacaaataaggagctgtctgtcacagactgaggtcttaagctcactggctcatttctgccaggatagttgagggctgtagagtccacagttgcctggcctgtctaagcttcagtcttttccctacttcccaagccagtccttaaacataggcaaggattttgccacctgccatgtttccagaaccaggtggcatttgctctagtaatagcccaaaccagcttaccattgagtaaatatgttattgtgtgcaggtgacctgggtccaccccctgctctgatcctaactgctgacccagacttcagattcaaagctgactgaggacagtgtatcatttattcctgaacaccagctccacaactagtaggtacattgactcaacatagagaaaacgggaaatgtaaagtctgagggttgtgtgtttgggagaggtggggtgggggtgtctcatttttaaaatacacgttcaagttttggacaagggcacataagcagaaactgctcctcctgatggggaaagcaccagaacattgctactcctcaagaagagactatatatatatatatatatatatatatatatatatatatatatatatatatatatatatatatatttgcgcttaatcagggagaaagaaaaagaaggcacttactacctgggtctacatttggcatcataaagagtttctttgggttacccctcctgttgaatgttactggttacacatttgttaaaatgtgtccatttttttaatccaaaaatttactttcaggagtaatcatgggtaaaatatagggcatacctaagggagtgaagtatcgctcaccaaccttgagtgaccttgcttccacatgattttgttttgcaaattctggtctgttcattgacagaacaacaaccacattgatgtgagctcctcatacatcttcagccaaggcacacagaaaaaggaaatgcctgacaaacaacccttctgagtgaagaatgatgggatctaatgccaggtgagaagagtccttatctggttgggatccaaaggctactcttattttttatttttttaattaaaaaaatacattttggtaggccaaggcaggaggatcacttgagcccgggagtttaagaccagcctgggcaatatagtgagaccctctctctacaaaaaatttaaaaaattagtcgggcattggtggtgcacacctgtagtcccagctacttgtggggcttgacggggaagatcacttgagtccaggaggttgaagctacagtgagctgtgattgcaccactacactccagcctgggtaccagaacgagatttttatctcaaaaaaattaatgaaataaaatattataatctcaaaattggttaatctcataactgaattaaaagtcaaatgaaaatatagggaaagctgaccattaaaggagctgttgaatatgtgccgtggccacctatgataaggaagtaacccaagcccgcccccggtagtgccctccagacctgactctgagattgtccataggactctgttgattggccagtggatatcaacacatatgatgtaagcagagacttgaaaagcatttagcattgccctcttgctgcacttggagataaccatgtgaacaagcccgagctatcctgctggaagatgagagacacatggataagaactaacaacctgcccaaccatcagacttgcgaatgaggccatctttggtcatccagtcacaagacaccccacagatgtacattggcaagagtacaacaggagtcagccgggacaacccagcccagaagagctgcccagacaacctacagaatcatgagctaaatatgacactcaaggtgtaggcaaatatgcacagagtctaagacttaggcccattttcctaaaaattcccttttattattgaaccaccgaaataattttttaatattcttaaacaaccaaaattgtggtaagcatgttcaggtgcagtggagactggatagtgtatttaggactctcctggtgtgcctcattacctaccaattacaccagaccatctgacaaagcctgctcttaaccatacaggtaactgtattcgaaatgacacttttgaatattttgaggactaaatgagtgtgtgtctgtgtgtgtgtgtgtatgtttgtgtatagtaaatgctgtctgtgctctgtccccattccctacacgtccttctcatgtttatgtgtgtgcattcactccagcagccaggacctcctttctttgggagaaactattcctcacccaaccaaaccacagggctctctcatggactgacagtcttagtccacccctaacccagccacaggtgactgatccatcaacaggcaagtgacccaaatcacaccaaccagaatcctggcctggaattttcaaactaaagcctaggagagacagatggttagacttatcaacaaggacctctcagcagctgtgttcccttccagtctgatattcagagagacagagaaaaaaagagaccagtagagtatatgtcatgggccttccccatgagatgagacaccaatgtgcctttttgtcccaagtcagttagaggtatgtttctgtcacttgcaaccaacagatctctggttgactgacacctctggattcctggtttcctagcactcttggtcttatttgaaatccacttgctgaagccacctattagacctagactgactgctccttcttggtcatatcttggatatggtgtttcccctcagggttcctgaagtctgttctttgtccactcatgcagtgtggtcccaagaagaataaaaacatgaagttcacagcactgcggagaacagcatcagccttttcctaactaaagctctttacttcgttagacattagctccctcttctttgctcagcctcctcagccactagtgaccagcattaaccttgaggttgtctaaagatgaaagaagaggcctagacaattcatgaccaaaacacaatcatagcgactctgtttgacatagagaggaattggacaacattggatcattcatatgaatatgtgcatgtttaattaagttggcagagacaacactcttgccatgtgacacagcggctctcaaactttacttgtttcagaaacatctgtgatgctttttctatctacagataccacagtccctccccagacctcttggatacaggctttgaaagtgggttaaaaataagagcaaatgataaaaatcaccagattaaaaatgggcaaaggacttgaatagtcatttctccaaagatgatgaacaaatggccaaaaagcacatggaagatgctcatcatcattaatcattagggaaatgcaaatcaaaacacaatgaaataccacctctggttgaatccacagatatggaacctacagaaatggagggccaactgtatttgtccttttgcaattggcttatttcactatttttatttgtattattttttattgttttttctgaatattttcaataataccaataaaaaacagtttaacaactatttacatagcatttacattgtattcggtattataagttatctagagatgatttcaagtattaaggaggatgtatgtagggtatgtgcaaatacaacaccattttatataagagactttagagtatccatggattttggtatctgtattgtacaattccacttatatgagatacttatagtcaaaatcatagagacagaaggtagaatggtggttgccaggggctggggggtggggggaataggagtcattgtttaatgggtataggggttcagtcttacaagaggaaaagtgttctggagatggatagtgctgatggttgcacaacaataagaaagcacttaataccactgaactgcacacttaaaaacggaaaagatggtaaattttatatcatgtgtattttaccacaataaaataaaaatgaaaaaaaaattagttgcctggcattcgctatgtgctatgagttggctttagcggtataatggaaagagttcaggctttgaaatgagggaggcctgggctcaatgctccggcacctgcactgaacctgccacgtggtgttgagtgagctacttcatcttttggtatttaatttgtgcatcaataaaatggcagcaataatatctacctgatactttttacccttctaccctaccttgtagatattatttaggataaaatgacataaggtatgtaaagatactgggtgcatcgtagttctgccccacaggcccccagctgttaattctcactgtagttaattatctcttccttttctatctttattgtcaaatattcacccataggaagccttattcaccctttccccaaacatactctcaacactgccatctggggaacattccacttaccttttcttccatgtagatattatcttgaataatacttgttttagttacagaaactcaccttttgatatgatgtgatcactggtaatgtcagtctgaatgtggacaggacatgtcggacagcaaggctgcctggcctccctccctagcgctaggacagtgtcctcagaaacagagcgccagggcctagctgagcattcacccacgtaagtgtctaccatcagttgtcctcctttgccagaccctggtccccacctgatgaaatccgtcttacctttcccagcccccactgaactgccacctcctccctgaagcctgccctttccttacccaaatgtgactgacctcccacttctcaaccacccttgcagctgatttctacctctccagcagcccctaccacatcttgcctagtgatctgtcgacttgtatctgcagatccaggctccgcagttgctaacgctgtacttctctcagcctcattttccacatttctaaaataaaatgggaatataaagactgcctacttcaggggctttctgtggcaatcaattgagctgaaatatataaagcctcatacgtgaatgctcggtaatttttatgaaggaggaggatgatgaggatgaatttttctgtccttaccatgagtcccaacaatcaggggccatgtgggtctttttaaaatttgtttaaattgggccgggcgcggtggctcacgcctgtaatcccagcactttgggaggccgaggcgggcggatcacgaggtcaggagatcgagaccatcctggctaacacggcgaaaacccgtctctactaaaaatacaaaaaattagccaggcgtggtggcgggcgcctgtagtcctggctactcgggaggctgaggcaggagaatggcgtgaacccgggaggcggagcttgcagtgagcggagatcgcgccactgcactccagcctgggcaacagagcgagactccgtctcaaaaaaaaaaaattgtttaaattgaaaaaaaaaatgacagggtcttgctgtcacccaggctggagcgtagtggccctgatcatgattcacagtagcctcaaactcctgggctcaagcaatcttccctcttcagcctcccaaagcactggaattacaagcctgagccactgcacctggcaagaggccatgtttttgatcttggaatttcacggtacctaaggccacatagtacaccctcaggaaagcaaacaagttaatgacaaattaaaggtaacctgtatttattgctgtcgcctttccaatcatggtgacgtgtcatagggtgggtgcgttcttcctcagagacagaccccgagctgtaccccaacctagtcttctcccagctaaatctccctccctggtcacctcattctagttcatgaagtgattggcacatttgcttagctctacggctgcttcatcacgattcttttagtcagtatcttcacactagtatatgagctttcttatgactcagaactatttaataaggatcccaagccactaatctgacattctggacacagaagaactcacattcatcacgtactaaggtgatgttttcaaagcgccacagctatccctcttccccctttcattgggcaagttttagttttggccaagacgtcttttctcgatgtccactcgcttctctggaattcagtgttgcagtgttgcattgtcgctctcagcctttgaatactttcccctttaccagttacaggcagagctcgggaaagtgctgtaccaacatgtgccagcagggacctgggagcctgaaggctacactcgcttctgccacagcatttgcttcctggggttgctccacccaactggcccaggagaaaagggctcaggaagaaaccattttgaaagagttgggaaatttatagcaatgtagtgcatactgtgcaatttgttctaatgcgcttggtggacagtcaaacagaaaatggaacagccttttcaaaagtgactgagatcctggctgggagtggtggctcatgcccgtaatcccaacactttgggaggccgaggcaggtggatcacttgaggtcaggagtttgagaccagcatggctaacatgacgaaaccccgtctctactaaaaaaacatacaaaataagccaggcgtggtggtgggtgcctataatcccagctacttgggaggctgaggcaggagaatcgcttgaacatgagaggcagaggttgcagtgagccgagatcttgccactgcactccagcatgggcaacagaaggagattctgtctcaaaaaaaaaaaaaaaaaaaaagtgactgagatgctgccactccagagccatctctcgtgatggtggagccttgggtggcagagtcatcagtccctgttcattcccttgctggctactctacaaatcaagtctctaatttagcaaaggtgaatctttcccaaaatggaaggatgttggttataattaagtagaaatcctaggttttctacctgcttaacaagtagctcaaagcttgtcttcttgtgtcttcaggaaaggcacagcaaaccgtgcatctgtttacactcagatgcctctggctggggccctgggccacccacacatcccgaagcccccaccctcccactgctgccatttgctagcacatgcacggcaccagtcagaacatttcacagagctcaggctttgtgggggtggcagtgggggggacaacaactggtttttggccagttcacctttgtctgttaaatcaagcagggaggaaagtgcttttttttttttgttctggaatgtagaacttccactctgtggagaatgaacttgaaaatgtatcagtgaactttaggagagtgatttcataattaaaataacaagacctgaaaacctgccactcaattatttattctcttcatgtcctgattatctttttaatttgcaaaggcagattttatttgtttatttattttttggccagccaagaatgccagctagccgctccggggctacgttgtgaacactaggaatggtgtccaattatgttaagttggattcaaatttcacttttgaaacaacaaccaaaaaaatgcaactgggagtggggtgtgggtctaacctgggttcagaaaggttaatgagaaaaccacaaaatcccacatcacagtctaaagttccataaagaaactgtcctctctcactccaccccctctttcttgtttaatcttggggcaagggagggtgatgttgaaattaacccattatgctttcaagaacactacatgcaaattaaatgtgtttgttttccaaaatctactttgttttctgccttccccgctaccatctcttaataactaaatttcccctgccactgataattataatttgggaggggagttaagccatggcattagccaggctctatacgcttcttcaccctgtgacccaaatgttggattaatgaggacatatggccttatcctgctgataaagccttggggtcagccttggaggccacactggcgcccctccctggtggtccctattgttcagcctcagagcacaggagattacccaacccggcctctcagacagttgtatacctgaccttctgcagcagcctaaggggtagggtgggtggatgggagagaagccagaacctcacagaaagaagggctttcctctcctgcaggtccccaaagccacccagcctgaaccctggggaccagcagccctggcatccagacacaggccaggcagacctcagaaagcctctcaaggcaatcgcaggcctcagggctgcctgcttatttcctgggccaataaccaccactacacacacacccaaggggacacatgtgatttcactatggcctgagggacaaacggaccaatgaggcctgaggggggctgatgggaaaggaaatgtctcccttattctttctcccagttgcttctttccacaatctgggatttctccaaagggatcctggggccctgggcaaatcacacactacatactgcacctggattccttgagagaaaaaactcttcatgtttatgaggcttcctggtttacaagctgcattcacacccatgagctcactgatgttgtatggcactatgaccatttctcctacttcacagatgagaaaatgaaagtcaagacagtctaaatggctggtccagtatcccacagtgtataactgatgtgactgggtatggtcctcagatctcctggtctgaaccttctactcctcctagctctttcctactcccctatttaagaaaaggaaaataaaaaggctgcctgcatcctgacaagtgaaggggcttgagcaagaaactccggccaacagggcataaccccttgatatatacactcattgcccctctgaggtcctgatcccatccacagcatagagggcatctccctcaagacccccattgaagtaccctccagcctgcttgcaaacggatattgagtaggtatgaagagggtagaagaggcaactgactctttccaaatctaagaacatcagatcaacaggaagataatttctgcttcctgccatgacagcatgccaaattccagactatctcttccactgtaggccactaacaaaactatttttagacattagaaggcaacacaagactgtggccctgagggaagagaaacacacaaggtgagaccaatgatggcccagctgtctacctggagacactgtccagaccacagtacagagagatggagaccaaacagaccatggtggctgcattgagaggaggagtcaaacatcacagtttggatctgctgacatggctgaagtatgagatcaggagactgaaaaggatggagttgtgcacaaaaagagctccagaatctgcataaagatcctcttaaacctttggctcaagactaaattgcacctgtgcaaagaaaaaattcatgagaacaatccctggggagctatgtgctggatggggattctggagtttacagaggatagagagacgctggagttctaacagctagagtggagagacatcaatgaatgtcccaggcattgagtcaatactcccaaaaagccacaccttgggagtaggactcaactagaggtctaaagtgaagactactctagacccaccctaacaaagttcaaaaaacaagcttccaagggatcaaactcattggcaaggaaattaactgcctgccagaactacactcaatgctcaacaaaatccagaactcaagggcatacaatccaaaaactgtagacaagcaaagtagggaaatgtgacccataaccagaagaaaaatgagtcaatagaaacgacccagagatgacagtatttttagaattagcaggtgagggcttaaagcagctattacaaatatgttcaaaggatttttttaataccataatcaaaaacaaacagggaatctcaataaagaatggaaatcatttagcaaaaaaaaaaagagttatcccagccccatggtccaccaggtgtcacactgaactgcaactcaccccagcatgtaccttcttttcacctttcttgaccacaattcacctcagtcccctttgtgcaccccacttccctttccaaattcccagtgccatcccctccctttcctgcatctgctcatgtgtacaattgaccatctttttaaaggccaaaataatgggatgaggccctttcttacaagtgccaagaatgggaataagaagatttaagaaagacatctacttccttttcttgttgtcactgtctatgtgtagtatgccatggtagttcagctcacagactgcctgggtgaatcctggctccactgtttgcaaactacacaaataggtagggtgtataataccagcttctattacaaacaaagcctcacatctcagcgacctagcacaatagaagtttatttcttaacccttctggacattgtcctaggcaaagaattcatgactaagcccccaaaagcaaatgcaacaaaaacaaaaagaaataaatgggacctaattaaacttaatagcttctgctcagtaaaagaaataatcagcagagtaaacagacaaccaacagacagggagaaaatatttacaaactatgcatctgacaaaggactagtgttcggaatctacaaggaactcaaacaaatcagcaaaaaaaaaaataataattccatcaaaaagtgggcaaaggtcatgaatagacaattctcagaagaagatgtccaaacagccaacaaacatatgaaaaaatgctgaacgtcactaatcatcagggaaatgcagattaaaaccacagtgagataccaccttactcatacaagaatgtccataattaaaaagtcaaaaaccaatagatgtaggtgtggatgtggtgaaaagggaacacttttacactgctggtgggaatgtaaattggtacaacctctgtggaaaacagtatggacatttcttaaatagctaaaagtagatctaccatatgatccagcaatcccactactgggtgtctacccagaggaaaagaagtcatatgaaaaagacacacgcacatgcatgtttaaagcagcacaagtcacatttggaaagatgtggaaccaacctaagtccccatcgaccaacaagtgcataaagaaaatgtggtgtgtatatatacgatgaaatactactcagccataaaaaggaacaaaatagtgtcttttgcagcaacttggatggagctggaagccgttattctaagtgaagtaacccaggaatggaaaaccaaatacgtatgttctcacttgtaagtgggagctaagctatgaggacacaaagacacacagagtgacatagtggactttggagactcagaggtggggaggctggagtaggggaggaataaaaggctacatattaggaacagtgtacactgctcaggtgcacaaaaatctcagaaatcaccactatagaattattcatgtatccaaaagccatttgtaacccaaaagctaatgaaataaaaattaattaattaattaaatttttaaaaccgtttatttcttgctcacacaaaatccaaagtggatgtttctggttgggaggtgctttccatgtgatcattcaggactctagtttccttgcatcttatggctgcaccattccctgggcctcagactcctcgttgggccctctgcagtcagctgccagatcagggcagagcatgcggaggatcgtggaggaggctttcacagccacttctgcacatagtccattggtcagaactgtcatgtggccacatctaactgcaaagacaatgaggaaatatattctagctagatgctcaagaggaagaaaaaaatgggccttagccatcacatagctgtctctgcctcactgtgaaaacctggggaagttacttatctttgagcctcaatttccttgtctgtaaacaggcatagaaatgatacctgcttcaggtattattcagggggctatcgtgatggttaaatgagacagtccatatgaagcaattagcaggaggctggaacatagtaaacatttaagaaacgttgcctattacaattattacaacatttgcatttaattaatttctccccacccatgaagtgtttctaacatgtgggcctaaaccaggggtgctttaacttttggacattatgttgttttttagtcaagaagtagtaaaacatgaattattatatatgcattggccctctatataataggattttcatacccaacaagatctttttacttaaaaagatttgagaactacagccctaaaggacctggaatgctcttttgtacacagtgggtgattaatatgttgaataaatggggtttcttgccacctctcttttttttcttcccttacttctgcttcctggtctcacttttgcctattcatcccatattccatacctccaccactatcagcaccgccacacacacacgcacaacacacacacacgcacgcacacgtgttgacagccacttaacctcctgatcttcgcttggggtgtagacagccctccacccacccagcccagtcccgctgtgtcctgcagcctcaatacacaacctccaggccctgcagccacttcagggtctaacaaaaccccaacccccttgctaggttcctcagaggctctagaaaaacaagccagctacgctcactcatacttgatagggaacggccttgctgaagcatttatctgttctcagatggatatctgttcactaaaatcaatttttaattagttgtattttaagccatgcaaagaaggaatgtgtgaacagtggtgaaagtctctccataagtcacaataccaggctttctttgaaatttaaaattggtgtgaataggaagggaccatcacacacacacccccacgacctccttgacaaactctttctcccaccaagtggataagttggtccctcattagctttcagcctcaactgccctgtctgctcctcatcccttggctagcagggtcatctttcagcacaaatggttgtcactgaccatgcagtctgaagctcaatatccactctgtggattcagcattctgcatacctagaggtggtgaacttttgagcctgagctccagaaacacctggtcactggtgctcctggaagaacgaatgaagctgaggccccctcagattatgatccaagcaccctgagacacaagaggctgatgcatcactcacttctctctactcctttttttgatccatacgtagccacctctaaagtcactcagaaagaaaacagaatgtcacttccctgacttatccaggggcttaatttacccccagccccaagatgatgatccatttcatcaaatgtgtcaggttaactttcctgcgcattacacttgatcaagacatgagcattccagtcttcgtgctgctcttcatttttccagggcaagatcagctgccattgatgctgctaaaatctggggccaatgcaggtgattcctgccatcctggctccatgaggatgtttgaggacaaaatggagctgtgcataagaaagtccacagtgtcgttaattagacataagacttgagctcccattttcctaaacagaatttacaccagcttctaagaccaagaggtaatccccacaccttatgttagctgtgaagtctccttccttaaccatttcttcagcagttcttacataggaaaattatctgattcatgtttccctctgctttttctttttttttttttttttttgagacagggtcttgctctgtcacccaggctggtgtgcggcggcatgatcacggctcactgcagccccaatctgccaggctcaagcgatcctcctacttcagcctcctgagtagctgagactataggcacacgccactacctctggctaaatttttacttttttttttttttttttttgtagaaacggggtttcgccatgttgcccaggctggtctcaaactcctgagctcaaggaatcctcctgcctcgacctccccaagtgctgggattacaggcctgagccaccgcacccagcttcccgctgcttttcttctctggccccattcagtagcacagtgatgctgggcactatctagcactatgtgccaagccctgtgctgtgatcttcattcaccctcatgggataaggattgccacgtccaggctgcagacaaagctcagatgcccacagctcatacaaggattcaaaccaacctctgtttctccaaaggctttgggcttaaacactactcagtgctattgaggagcaaaaagaggaaggaccatgactgagaccaaaaaactggaatttgggctgtctgggtaatgccccaattcctgcctcactgtatctctgttcctgtctacacagccctggctggaagaatatacaaaatgtcagcttgctaaggttgcattctctctgcattatttctctggtgaagctgtgctcttatcaatatattaccaacagcaacagctgggtcctcatgaaattacggataaagggccaggcacggtggctcacgcctgtaatcccagcactttgagaggccaagacaggtggatcacctgaggtcaggagttcaagaccagcctggccaacatggtgaaaccccatctctactaaaaatacaaaaattagctgggcatggtggcaggcacctataatcccagctactcgggaggctgaggcaggagaattgcttgaacctggggagcggaggttgcagtgagccgagatcgcgccacttcactccaacctgggcgaaagagcaaatctccatctcaaaaaaaataaaaataaaaataaaaaaattatggatattggttagaaatactctcaagtttccttcagaaatgttctttataatgacgtggaatgggagagagaatattttaggaatcactggaaaaccaaacaatagaaggagcagcatatgccggagatgaccaaggtttgcctgaaaaggacagaaatcacattgctatcacaactaacgcatggccctgcgtaacccaaaacaggagaggaacctttgggccctgcccataaagacagaaccatttcctcctatatttgcattttttcctttgaaaatgcagacagtttcctgcattggcacaccagcacgaccacaaaataaaatagggagacatttgatttaggcagaaagttcaagtttacttgcaccatcccaaggcagttttgaagcaagaaggaaaatggcctgtgccaggcactgcaccaggagcttcctctgggagctataattgcattctcacaacgactctgtaaggcaactgtaattctccccatcttctacataatgaaactgagccttggaaaacttacatgatagtttacccagaactgaattagaacccacaactctgtgagtccaagaccagtatttctcctactacagcgccccatggttaaacagccacattatccagccagagtatatcatcacgcaccatcaacaactatctcaggaaatctggtgtatccaccgtttgctaatgcacacaagtaagctcatggctgtgagtcactatcaggcagataactttttttaaaagcctattaaaaacatttttaaataacctaaacttttacagctcaagatggtaaattgagcgcacactttgtgcggtccagttaaaattctgaggtccagttaaaattgtgataatgggtttttaaaaataaaacccagtaacagcaaagcaaatggagtggaggaagccttagcagttagtgagagttcaacacattttgggaagacagtaaaaggtagaaggggggttaggggaactgcaggcaagaaccttgcaggtggcgctgaggtggaggaggcccacttgcctggcagaaccctgcagggccaggaggggcagggacaagaagtaagctgagcactggaggaataaagctgtagttctcaaccctgattgcacaggcgaatgtgtggagagctttgcatggcaacagtgcctggatgctaccttacggattctgatttaattggtctcaggtgcaatctgggtgttgggagttttagaagctccccaggtgattctaatgtgcagccagggtgagaaccactggctgaaggtctgtatggaaaccagtgtttcccccacccccaccagcttacagctttacctcgaagcaaagaagagtctactttgagaagcactggcaatgtagaaaaagaaatagactatcctatatttaacactttggtgaatgctgaatactcacataatcacaatagtataaatgtcagttgttggtttctaactttcagccttcccaaatagatgcataaaaatagtttcaggccgggcacggtggttcatgcctgtaatcccaggactttgggaggctgaggcgggcagatcatgaggtcaggagatcgagaccatcctggctaacacggtgaaaccccgtctctactaaaaatacaaaaacttagccaggcatggtggcgggcgcctgtagtcccagctactcgggaggctgaggcaggagaatggtgtgaacccaggaggtggagcttgcagtgagccgagatcatgccactgcactccagcctgggtgacagagcaagactccatctcaaaaaaaaaaaaaaaatggttttagagacttggaaccaacccaaatgtccattaataatagactggataaagaaaatgtggcacgtagacaccatggaatactatgcagccataaaaaatgatgagttcatgtcctttgcagggacatggatgaagctggaaaccatcattctcagcaaactatcacaaggacagaaaaccaaacaccgcatgttctcactcataagtgggagctgaacaatgagaacacatggacacagggaggggaacatcacacagtggggcctgttgaggggttgggggctggggaagggatagtgttaggagaaatacctaatgtaaatgatgagttgatgggtgcagccaaccaatatggcacatgtatacatatgtaacaaacctgcacattgtgcacatgtacactagaacttaaagtataataaaaaaatggttttagaacatagtacagttgtagcttgattaatgatgaggatatactctgagaaacgtgtcactgggtaattttgccattgtgcaaacatcatagagtgtacttacacaaacctggatggcatagcctactactcacctgggctatatggtataacctattgctctgagggtacatacctatacaacatgttattgtactgaatacggtaggcaactataacacaatggtaagtatttatgtatctaatatatatctaaacatagaaaaggtacagtaaaaaaagtatggtataaaagatgaaaaaatggtacacctgtatagggcagctccattataattttatgggaccgctgttgtatattcaatctgtcattcacctaaacattgctatgaagtgcatgactacatgtaaataattttaatctgactatataaaattaaagaactctccctgcactgctgaatcagaagccttataggcaggacacagccaggtatacatatattttaacattctgatacacagccatggtggaaagaaactgacttattgttatcattttcctcctccataaactattttccaaactaggtattatggagtgtccctctcaatctgcccccctcactcaggcacacaccccaagcacaggcatgtgtgcacacatgcatgtacaatgacatctcaaatttcccatatcgttaggtgagttcagcctttcccctgacttgaggctcatccattcttccatccaccaccaccattcctgccaggctcccttctgaccccccgaggccattatcaccagcaggcccatggctttgacaccaactatctccacctcccaaaccagccacttgctgatgctccacctcttctggtagaagtttcaacctgagccttgaaggccctctgagaaataacaccagtagcacaggtgtgataggctccacagatggccctgactcttcacctttccctttgccatgtgactttgcagctcctcccactagagcagcacaggacatttcccaccctcttcacatcaggtttggtcgtgtgactggtttggcaaatggactgtgagcaggggcaacatgactgacagcctggaaattcttgatgattgggcatgaaacttggccatcataggagcactcccccaggtggctgcttccccttcagtctgagttccagatggacacaggaaaagcagatccaagatgaagaggagccaagcccaactagatccagatcaggaagtagagctatgctattgactgagttgtgcactgccaaaatttatacattgaagtcctaacccccagtgtgatggtatttggagatggaccctttggaggtaattaggtttaaatgatgtcatgatggcagggaccccacaatgatattcatgtccttataaaaagagaatgagagcagagctttctctttctctcctctgtgtgaggacacagcaagaagggggccatctccaagccaggaatagaaagccttcatggggaattaaatcagctgacaccttgatcttgaacttccaagcctccagaactgtgagaaataaattcctgttgtttaagccaccctgtctatggtattttgttatggttgctcaagctaactaatacaagttgccagccaagaccgtttaaaccaactcccagatgtatgtgatccaacccagccaagaccagcagagccactcagccaagatcagcctacccccagccaacccacaaacagatgagctgaatgaatacttattgttgtgcaccccagaagttttgtagttgggagctatgtagcatacatggcaatttttaattggtatacataaactccaaattctgtgaaggcaaagactctgtcttgttaactgttatatattcagcaccaagcacagtgtctgccaaataatactactaaagaataattattgagtgaattgataaatgaacaaataaatgaatgcatgacaaccaaaggaaaacactggaagagctcaatgcctatttcgtgtgctggttttattagtcagggtcctccacagaaacagaaccaataggatttatatttgtgcatgtgtgtaaagaatatatatgtgtacacacacacacacacaagatttattacctgatttacaaacacagatgattatggatattggcaagtcccaagatctgcagagtggagatttgggtggagatttggtctccaagctggagacctaggagagcccaatgtttacttactatccaagtccataggcctgggactgatagctgatggtacagttccaatcctaaggctggcaggctcaagacccaggaagaactgatatttcagtttgagtccaaagtctggaaaaaaagccaatattcctgtttgaaggccatcatacaggaaacattctctcttactgagagaaggacatctttttgttctattcaggccttcaactgattggatgaggctcacccacattagggaagggaatctgttaaactctgtctctcatcttaaatattaattgtatcccaggcagatcatttgaggtcaggagttcaagaccagcctggctgtctctactaaaaatataaaaattagccaggcatggtagcgggcacctgcaatcccaattacctgtgaggctgaggctggagaatcacttgaacctgggaggcggaggttgtagtgagccgacatcgcaccactgcactccagcctgggcaacggagtgagactctctctcaaaaaaaaaataataataataataattacattcaaaaacaccctcatagaaacactcagaataatatttgaccacatatctgggcacccagtagcccagtcatgttgatgcagccaacatgcttaatgcactctatgtggcgagtccccagagcagaggtggctcacccaccacctgtcattttctagaacagctgtagcaatggatgaattaaaaagggtgtgactctttctggagtgtgacatctttgctatgctaccaatggtcagtatgtgttgtcctcaggaaatgaagggagaggggatggaggtggtggggaggagaaagaacaatatcagccctgcacaatatcagccctaaattccggaagtgccatgtggagggttttgttcaagcctggcttctccataatatgttttgacgggtttgaaattggcctgatgcaggccaacaataagaggagagttgagcttacatagcagaaaatctatactctctagacacgtgcttactgcaggagaatccaaggtattgaccttcaattcagctcccacatgagctgatgctgagataaggggagctcatctgttcaccctcccaggcacttccaggctcacagccttagccatggctttgtaagtcactaaatgggcctttattgactattgggcctttattgacacctccaggacagaggaagcttatatcattgggccccgcttcttcctccctacatcagtgatgcctgaaattcctttgaaagaagcttaaaatgcaaatgatgctaggagagagaaatactggatttaaattcacagtttacacctctagagatgtggtctctcatcacactatctccgcactctacaccttcctcccttccacactgcacccccaggaaaagagggcacccattgtattattcctggttctccagagaaacagtacctataggagacgatagacagattagatagatggatggatagatagatagatagatagatagatagatagatagatagatagacagacaggcagagacagacagatagatacgcaggcaggtggaaacagatgagagagagagagagagagagatgtgaaatttattataaggtattggttcatgcaattatggaggctgagaagtcctaaagtctgccacttgcaagctggagacccagaaagccagtggtgcaggtctaaggcctgagagccagagagccaatggtatagattccagtctgagtctgaaggcctgagaaccaggagcactgagggcaagagaagattgatatttcagctcaagcagtcaggcagactgcttctgctgaactgtgaacacaattagaaatatccagaagatgcagttgcaaatatggagaagaggtccagagagtttgtcagataaaactttcttcaaggaactaagtgacttgttactatacagtttaagatctgcaacatcaagctttagaatttagacattttatgccataggaatattctgaaccaaaatttcattcattgtgatatggtttgactctgtccccacccaaatctcatctcaaattgtaatccctatgtgttgagggaggggcctggtgggaggtgattggatcatgggggcgaatttcccccttgctattgtgatagagagttctcacaagatctggttgtttgatcagtgtctggtgcttcttctttctctctctctctctcctgctcctgctgccttgtgaagacgtgccctgcttccccttcaccttccaccatgattgtaagtttccagaggcctccccagccatggggaactgtgagtcaattaaacctcttttttcttttttttggatggagtctcactctgtcacccaggctggagtccaatggcacgatctcagctcactgcagcctccgcctccagggttcaagcaattctcctgcctcagcctcccgagtagctgagattacagacatctgccaccatgcccagctaatttttgtattttttggtagagacaaggtttcaccatgttggccaggctggtcttgaacttctggcctcaagtgatccgcctacatcggcttcccagagtgctgggattatgggcatgagccaatatgcccagccctctttcctttataaattgttcagtcttggatagtatctccgtagcagtgtgaaccacagtgtccatttgaacccacattgccaatttggttctgtgccaaagaaacaaatagcaaacttctcagttatgtgcagaaatgtattttaggaagttaggcataataataacaacagtagtagtaataataatagtattttagcatgtattaagcactttctgtgtattagcactatactaagcctctcgcaaacattatctcattcattctttacactaaccccatgatctaggaattatttttctctccaggtccaggttaggaaacaaattacagaggttaaggaacttgctcagggttgtccagttcttggtaactgagcctagaaacaagcacaggatggtctgagctcagagcctaagtcttagcatacaggaaaaccagacagaaccgggtgtgccggggaatgagagaccaggaattcacagccaattcaaatctgttccacatagatgggcccccatctttgttaagtgaaatcatccaatattagacttcattgccctcagagatgaaaataaccagggctcccccaaaacagatgctaagacagaaatttaggtgcaagtaggttatttgggaggtgattccaggaaggctgctggggggatggggaggcaagctggggaagtgagacagggaagagaaggaaacccctatgaggcagacgaatgagtgcttcactactgtgggcaatgggcttgcgcccagtggggacatctgggtgactatgtcgaacacacctcagagttgtcccacccaaaggccgaggaagctacgttatttatccacccactcctgtctgcctatggtccagggcccctccctgtagcattcatttctgagcacttcgggcctgttgtttgcttatgctgtgcaggttctctacctgacacaggcactggcatgtgcaagggtggtgagggcaaggggacatgggtgggccctgacagtgtttgcttcaccatatatgtctccagaaggtggttttggcttcaaatttgatgatcatttcatcttctcacaaagccatcattctaagaaaattgctccagccaagggcttggaattatgagaactggaggtagaatatctctcttctcctagacccctccaggtgttcacctgtgagaaaggagagggttagacaccctctgcatgagacgttgtttggcaccaaagagtcaaagtccatgctgtagacttcccaaggcgctaacttctgcttgcctccctcatcagcatctctaaacttctgaggggctgggacaaatgggcaggtgaaacaaaccagcggacatattcaaggcaggcagggagtggattggatacacatatttctttttcctgagagaggagttaaaagcccgtagtgaaagaatgaagtgataaacagtatggtcagggatattttagccttggaaatccagatgtaagatattatgagtatgtttgctacattgatttgctccactttttagcacttaaaagggaaaatgagctttatatcacattataactgactgtgtagtgtcgaggggtgtgtgcgcgtgcgcgcgcgtgtgtgtgtgtgtgtgtgtgtgtgtgtcttatgcataatcaagaaagactcaagagtttataaagaccgagagggcaggcatgaaatatgtcatagacatattgaaagtgtgctactaccaaatatattgcaagccaaatttatattggaaccaaacctgaattctgatttttgttccttttaaccaaaataaaaaacttttcaacattgaaagctttgatggaatccccatagaaggaatttagatgaaactaaacataatcttcattttcattttaaaatttaaattgggtgctatattacaaagatatattccacaaaatacaatttcaatgccaaatcatccaagaatatgggaaaggtgatcttctaaaggtttgggttttttattttctcctggagcactttgtctagataaggttgattcctgccttctgtgactatgatttcaaatatgacttctctgaactttatacccttattttgaaggaaagcattttaagagcaaaggataaaattcaattaattgagatgacagaaaataatctattaagtgaatatatcaggcaattggaagctttcatacctttcaaaaaggaaataacctatttcttgccttgttatctaatgacacaggagtttatttctcttgaagctgttacaaatctacctaatgaggcctgaacactgttgccaagcaattagagtttttattgtgtcactgatttccttcatttccgcagtcgctgataatcattagccaatactgtctccgtctaagaatgcacagcgtgcatatgtgtgtctgtgtgcatatgcgcgcacacacacacacacacacacacacacacacattcagcctgctgagaatgcctgtgggggagacagcctcagacagttacaaaatttgtaaatttctgcacatcttatttgtcactcataaacaacagagtccagcagaagtgacttccaaggccaggtcgtaaaaagtaatgcagtttccatcttaggagctggaatacctgctcttacaaagttcagctgccactgcagcccaagggcccagaggcccccatgttgtgaggaagcccaaacaagcccatgcagatgaccacatggagagagaaagaaattcctggccgtctccatctgctgtgccagctccagccacctactgatggcaaccacatgaaagaagaccccagcagaaacttcccaaattccggacccacagaaaccataaataggaataaaatggtagttggagattaagccagtaagttttggcatgctgttgcacagcaatacataaccagaacactacatcctagagcctgagtatgattagactatttctctatacacattccttctcttaacctatgcagcagatgttatcagtgctgtctacagccccctgacattcatcatttccataccagctgtcaacttcctacggaaagctactgtcactctttgcctgggggctttcctggctcagcccatgtggccagtgaggggcaggaatgaagtaccagggagttattgactccagagaagcccttaattaatggaaatggaaatttctagataagtagcccaactcttacctctcagatggaaaactccgatgcatgttcacaccatctacagaggtgctgcaccttctccccagctgctcacagcagcctgatttgctaacacctatcatgggctgctctgcctgctctcctccctactggtgcttcctggcaacatttgtctgcaaattctcacctcaggggcagctccagagggaatgaagactaagacaatggggaaccaggctgaagggcagttggatcaaccagctcctcaactgctgcttcaaatcccatgaagagtggaagggacactcagagtggagcctgaactgtgccccacctgaaactagattcagaaggggaataaacaccctcactcattcagatgtattagcaccaggaagatgtacaagcgaacatcaacacaattgacaaatcatgcacatgtccagagtgggtaattttgccacatacagccattcccctttcttgctccaaattttgaaaaattttggagttggtaaggatgtattacatactgactgtatgcctagagctctgtgagacaagagtaacaatcgtgagagaaaaggcacaccccaatgtcacagcactaagaatgcagtcagggaagcagtgagttgtattcacagcaaagccacagagatggctcacagcgactcgggtgagagggttgcagagaagcaatctccacgctgagtggtaatatcagggtagtgatatcactcatcttcccattcctagggagctgctgtgcttggtggaagaggacttaaccagccaagcttgtgggaacccaagctatttgcttggtacctgactgcagaggacaccggcatggtaattgccattcgtggagtgcctcctctgtggcaggcagtgttcaagggcttttatatgcaaggtggtggcactttatgcaaagggtactgttcctgaagaaatcacataatgcaaagctgcatgattcaacataaatcccaaggaaggaggtacttctgatcaccagccatgtggcaacatcataaaccagtacacagttcattcgacctatcagctttgaaatgacccaattctagattaatttttatttcatggagacttgcattgtttcaaatttgcagcaaaaatataaaataactaacattgtatataatactaaattctcataaaatatatcgttatgacataatcgtcatcttcatgattctcctaataattaaaagctaatatgtgttagttaacgttgccattcactcatcacatagtaattcataaagagcatcatgtttttaaataccataagccaagcagagatgttaactcaatctgctacaaagtaaatgttgccattatttcgtttcgtaattggggaaaactgagtcacagcgaggttaagtaacttgcctacagttacacaattgataggtggtggaaaactgggactccaggccaggcagtccggctctagaacctattacgctctccaccaccaggctctacttcctcattcaaaccttacaatggccctagatggacatattgcatgaaataactgagactggagtggtttagccagaattccaacctggttctatccagctgtaaaacccacatgcctgcattcagctcggctgcatcctgccagcatcttatttcttggctgtatcaggaccaagatagacttattccagcacacatcaaagctgaccttgtcaactcagatacttttaattcaatataaaatagaaaaatgcagggaaaatccgtttttaccatgaaacttgataagaagcaggaagacatagtggttggtgaccttataccaataatagcacacatttattaagtccctactacagaccaggcactgccctgggaaccttctggatgttagctccgtgaagccatatcacagcctaacgaggtcagccctgctgttcctccggccgtgcagttatctcagagaggcaaagaggaatggaactgggagggtctgcagctgtttctcttaatagactgctctcattgggtctctcctcaactcataaaggtgcaaagcagctcggatcacgatggggaggaaaaacaggcaggagaggtaggttgctcagaggacggcaacagcagtccttagaatgcccagaggtgaaagcagagaagatgtttccttcactagttcccagaggccccagaagagctcaagagttccaggttagggataccctgtgagcttcccggagggcgggcccatcagagcccatcagagcgcccactagagggcagaagtgagcagaggggaatgaggctggcacaaaaggcactgggagggtggagggagaatggatgctggtacagtggccagaggggactgggaagtgaggaaaattgccatggtccaggtgaggtatgagagtcctcagggacctcctgtgtctttgggacctggtttttctggaactttgagagactgtggctcattaaggactattagttactctgataagcgtaatggtgcatgccgtcttaagggctgattttgctgtcacttaattgaaatttatcccaatacatcttcatcagaacatttggaaatggaacgggcaaggcagccccactgagtgtatagcaaaagtgtgggctgaaaactggtaatccacacatagtgtaaagagaacgtgctatgtaattctcactaaggtactgcccggcacgggagctatagagcttggcccagagccccttaccagctgctgggagtgttggctgctagggatctcagctgcctccctcactgcagaattgtcctcaggccaaaagggaagctacttacccaggaggttatgagcccatcccatgcgcggccagagcccagtgaccacaccttacagggctcatagatgcctcaaggggcatgaactccacagtgcaattcacactccagagctccccagggggctggagctaaatcccaggcacagatcatagctttgcatagcattaactgatgaagtagaaatgacatttccagttacccagcagggaggggtttttgaggcctactctccataggctggttagttccaactagacaatactttagaaattagccaacccattttcatcaagggtggaatcctgtgtgaggcactaaaaacctagaaaccacccaataagttaggtaaagcatccacatacaacaataaagtactacacagatggtggaaatctggatatagatgtagatatctcctggcataggaagtacaaattcaggctgtagagccatgtgaatagcatggcccctttattttacattgattgattgatttacttacacacacatacacacacacacatacacagtgtcttagtgattgtggttcttcccagatcaggctgagacaagggcttacatgtacatggtcagtgtattttggaaagagaccacagaaacgggagagggaggctagagaagaaagagacagagaaagagggatcatcactactgtgaacatctgggcctaggcctatttgggactctctggagcactatgtagacagccttagaatcattcgcttgaggaacaggacaggggcatttttatccactagatataggccccattggtcaagagttgccctatgaggtgttcattccttttcccttccagcgatcacctgcactggaatggtggtgagtgctccatcctgcagtggcaggggtgccctgaggcatacagcaagagataggcaggggaggtggagttatacctgcacagctggtggccatggcaacaactggagttaaaagatgggtcaaggggctatgaagagggcacaggaggtatacaatccacatagagaagtgtcaggaaggatatttaccaaactgttgacgacagtcatccctgagaaggaggattctttctcttcattatgctttcctgaacagtttaacttttttcataaaactatacaactttttgcaaaaaaaaaaaaaaaaaagccatatcaaagaagaaaacatcccatttgactccctcattttacaggtgagtgattcacatttggagcagggctcatggactcgtggctgggagctgtctgcagtgtgagcacagtactgtggccccgccagccctgggaatgtaaaggctattgcctacacagctgcagctcagagtggaccatgaacagaccaggtagtgcagccccatgaggagcaaagatgatggggcaggaagtccagatccagacaatagccacacacccctgcccccaatcctgaggaaatcgctattctgaatgccatcaccaagtagttttgcttgagcttgaacttcattattacaggtcaatttccccaggaggcagaagctgagtttttttaggcaatgctcttggtatcaacacctgtgaggtgtgaatgaagcagattgaggctggactctggactggaatgaggtctcaaggtatcaggtgatcccatcaggacctccaagctgttggaacaagggagctgactttatgccctgcactgacgaatcattgcggtgtttgtgcttttggtgttatatctaaaaatatattgcaatatctgaggtcataaaaatttacctttacgttttcttctaatagttttatcattttagctcttacatttgggtttttggtctattttgggttaatttttgtatacggtatgaggtaaggtccaacttcggtcttatgggtatggttatccagttgtccctgcaccatttgctgaaaagactattctccactgaatggtcttggcacccttgttgaaaatcagttggccatgggcacgtgattttatatctggactctcaattctattccattgtttacatgtctatccttttgccagtactgcactgttttgattactgttgctttctagtaagttttggaatgttgaaatgagtgttaacatgttttaacatgtctttttgtagacacattcaatcatttctcttgaatctatgcctgggagtgaaattgctggtatgcatatatttaatttcagtagaaactgcataatagtttatacacgatttatttttagtaacatgtggatatgagtttatacaaatcaatttaatcaaaaccaattgcacacctgaatgtcatcagttgtcctgaattgcaactgttcttatgttttcatggtgagtggtggtggccttgctctcacaaagtttttctgtgactttctgatcaacaagttccgtggaggtggtgatctctgggaggcagagtcctctgggaaaagggcctcaggttgacttgggaggtcagccagagcaggatctaacaccttactcaagaagacagaaagcagagaagaggtcacaagcagcaactcaactggtgagcctccattggccaaggccgctgcattgaaagcacctgtgggcaaatcacaaaagtcaccactctggggagatgaccggtgccccctgtgatggaccaattcacaaaaagctccccttcctctgctgactgagccccatgcctggctcagggtgtggtggacaggccgggcagggccaggcatcagcctccactggtcactctcatgagtgggcaccgcatgcgtgttctcaggagcctgccagagattgtcctgctgtgactgtgctgacagccaacaagagacaagaaccacatcaaaattaggaggaaagctatagcccaccccagcactgggctgggtgctttaggcaggcctagctggcctgcccagttgcatctcccaggggtgcctgacttagcatgggttcccccaaagcagggcctgagatgaagatttgcgttccggtggtttgtttgggggctgacccccaggaagccctgtgaggaagtggggagagtcaggcaggagggaacccagtgtgggtaagtgagtgggtgactgcagtgggcgcccaggacaaaatccccaggacgctgtagctgtagggacgcctcggggaggctgtagggaattgtccctctgagtagtgaggacgctgcatgtttttccattaattcccacccttcattgatggagggtcactcccagggtgttaactcccgggtgcttctggtttgccccatggatgagcacagtccacagacaacaccctcagacagagagacacaggaaactgacctgggagggagtgtcagcaggacacctcctcagtgggttaagtgagtggtggcaggataccgacagcacctgctacattccctaggcccaaagttaagagtttcccctgcccccagtaggcccactgactaaaccatacagattagaatagagcagccagtgagaccctgaccattatttatgttccctcctctgtcaccccagatgttgggggaggggtagagagagtgggaaaatgttgttgcaaaaatgcaaaaacccatggcctggagcagataaaccgtgcttgaatgaatggcttgttctctagcagagaaggaactttatttgaatagttaatcctcgcgtgttgcaacagcccaagatcaccctgcaaaggctattatttgcccagagcgttgcaggctggggaaatcttcatgtaccccttttccttttaaacaccagatcctatatccaggctgagatattggaaagcaaattgtgagccccgtctgccagctgggggcatgctgagacaaaggaaagattctcgctggcagagctccctggccaggagaccctcatctagtaggaaggattttaacacattcattcccatgttacacggcattcctccattcttgaaaatgctacgccaaaaatatatctttctgcttgttatcagtttattcatagttttagattcagctatagctcgtatgtggtaaaaacctaggccagctgaggggaaaacactctccccagggatccatctgatttataaataaacaagtgctgcagctgtgggggttgtggaatggagccctctgtgattctacagggaggcttcacacaggatctcttccgaagacaaggagaacttaaggaacaagagtgtgtgtatgccacaaagtgatacttctagtctcagctcactttgaaaggaaccccttaagaactttacccataaaacttcttgagtgaatttgagtcagttaagccaactcaatttggtagaaaatcatgcaacattgctgaaattaacagcctctccagctaacaggtagagaaactagaaaagacccaatggcattgcatttatagtgaagaaagaaaaataagctgagcctcagttcagaaaagattgggggcatttttgcaaagcctctcataaacacaagcgagaagtccatttaaaatcctaaatgaatgctcagaaaaatatccaggtttcccaatgttaaccaactgtttgctcacgtctatatgattaatacatatcctaaagctgagatttaatttttccaggatgcaaagcctggtgcttcagctagtattgtaatcccctatttggaaattgcgaagttatgaagagaagcctccctcaagacaacatcaaataaaattagtcaaatacagagaaggatactatcattttcaagatcacatgaagatattttttaattgagaaaacatttaaaggatgcttataaaagagatatagtgaaaaacaaaagttatcccatattttagatagacttttatgtttactgtctttcggaagtaaaactttcaagtcacacatttgttcaacaaagatttgcatgattactttgctaggcactcttctagacactaatggtgtaacggtgctaaagacagcagctgggctcctgcgcccttgaggttaccaatcttggccacaggggataggtgagagacttcatattgtgcatggatgactactatttttttaaagatattagttgactaacacaatcgttcatgcctgtaatcccaacactttgggaggccaaggcaggaggatcacttgaaaccaggagtttgagactgacctacaaagctagaccctgtctctacaaaaaacaaacaacgacaaaaaaattttagttaaaaactgaaaggattttaatagttaaaaatcagaaggatcaaaagcaaagatgttgaaggagtctgaggagtgagcaaggttgtgtgtttccaggtgttgaaagacatcccttccccatagcgggtctccaaatgaaccaaggaaatacctggcctctcacctgaacaatagctaagtaatgatacctaactcatagggttgccacagagtatgtgtgcaaagcctggtggcacccatgataatcaggtgtgacctgctattatattattaaggaactcacataatacagtatttggcactagaagatagtctgtaaatattaattaacttctcttactagacagctacacacacaatacaaacacatacaaccttaagccagggtctccacatgggggggtgcatgacaatccattgggtaaaaaagaaaatattaggacatctatttgtaagttttatgtaaaaatggcaaagtgattaagttttactgaaatacattataatgattgacaatagtgcccttcctgggtctgtgtgtcagagtcttgcagaattggtaccagaggtccccctgagggaatatgggaattccactactccagctgagagtggcacgcccacttggtgtcttctgtgagcctcattaaatgaacgcacagattatatgaatccagctttaactaaataactttctcaacctgggaaagtggcttaaaaatattgtagacaagaaacaatggattgaagataatcctaatatcacaagcagaaagatgaaaataaatggtagaactgacccttgcattcccaatacctcccattagcctcattacaaggtaaaaattataataatctaattagtatgagaagaattcagcctaaaatattgaacttataatgaagactactgataatgagcatatccaaccattgttatggagaatgaattccacatgtgtgtggtggtttgaagatttgaggtgaaggtgatggaaagtcacagtgataaccaagacctacaaatagtaagcatttggtgtgcagaagcaaatatctgagacttctaagcaatgtttacaattgtgagatactcagttcagtattttatcaaagtttcacacagattactgaaaaatattgaagtttttaaataaagaaaaataaaaaagctacctaccattgagtaaacccttctctttatgccccagtaaaaatggctgcaataatacagaaacgacaataaggcggcaagttaaaatgcctgcctttattagcaacgcggttggaaatgcatagcaaacaatgctgaagatttaaagatacacacattagaacaaattatgctttaccaaggtttgccagagcattgaatgaaagtacagatatttccaacatgtctcgctttgtgctgtttgctagattccatttcaatagtgaaatacaccaaaggccatttttttatgagccactaaaccgttacagtctcagtagtaaatgactgaaaaagtgttcagggtggaaatctgttaagtgtaatcactagtggtggaatggctgaattattgtttgttttttaagaaaaaaattacagtaaagttaacaaagaaagcacaaccatcaaatccatttactgtgtcgttcttagcaaatagtgaagcaagatgaagaaaacaacagatgtcacctatgaggttaaatttataaaaacgagacttgccaaatatgattgaatctttaacacattttataatgagaatagaaatgaccctaagaaatctttggaccacacagactgtcctttggacaatgtacctaaaagaacagggaaactaaaagggttccggatttctggacttctctgtgatgacaagtagctgtcactactatgtgacctcacacatatttttcaagtaagcaagcacacaatctattactatagtgtaaaagagaaaggaagttctctttatttaccaaggagtgaaaagtagctgcttttaaaagaaaatatatcccataatgacgcattttgaacagtgtgtgttcggaaacatttccattgtcacacaaatatacttattacccaaaactcccatatttgcaccctcacaaacagaatttttaacttgttataaggtcttctaaacaaagaatttttcttcattctgagcagatttttgaaaatataaaaatgcaatacttttcaatcattttgttagactgatatcaagaaagctatagtttacttagccaaattcgaataaaaatttttgaaaattgaaagatgtgattacaaatgtgttttgtcacttagcccagccattgatgcacttcttccatttggatatataaaactgtgaggtttatttttttgagacattaaaagcaagaactgaaataaattgaacttagaatctgaccttcaaatttaccatcttactcacagagatcaattatcccttaatatcaaataaccattgatgttccaagtttccaattgtttcataaatgtcataattttttagtttgtttctttaaagtgtgtttatttaaataaagccatgagatgtattcgattgttctgtcagatctattttattttgtaggacttccactcacatctctcctttctttgtcatttatttgttgaagaaagtaggttgattggcccatattacttcatataagctggattttgctggattcatctccatcgtatagtctataaagttcctcagtcctctgtatttcctggggaaaaaaattataattgcatatacaagttgctctatttttttttcttggtaaaactactttatagtagagtgggtatttccaccaggaagcacataatgtctggttctcatccttttggtcataacaggtattgacagatatctttcaaaataatatgttattataaaatgtgtgatataaacagaaagtttaaaacatacagttcaaagaaaaataaacatccacatacctactacccagattaagaaattgaataaactgtgtacagttcatatcttcttagcttccctttctcgtctctccccagagacaaacaacagaacttctgtattagttattttttgatttttcacttaaatacatctaacacctgagtctgtattcctaaacaatatattgccacattttttaactaggtaggaagtacacgtttctctgtgtgaaggaaggacactattatcactgtgaaatgaaggcttctagaggaaataaactgaagagatcttctgggatatagtttgtcatcagctatccatgcagtttataagagtcccttttgaaaaaaatcagagggcaagactttgaataaaaacctagaaaacttgaagctttgtacaatgaggctgtctggaaggaattcaatgggatcagtattgaatgccttcccagaatatggtcaatgagcatgggtcactttatattttctatttctaagttcaccatgcccttccttggtctttcaggcgtaggtccaagcagaagactctgtgagctgaaatgagtgctctcagtccaggctacaaggctgcagggcaggaacttcttcagtacatgatcagtgtgaaccaaaggcttatcaaaatttgggctaggctcacctagatgttctgtcttcacattaaaatacaaattatacaatggcagtgactatcttgatattctgttacaagttgactcgagtcattctgagctatctgtactagttactctctgtgtttggcacacagccatcaccctgggatccttgttctccatccttctggagaattcctcttatgatggtcctcttataatatagtgggatgcagcaataaaaataaaaataaaattcaataagatacagcaataaaatgaagaaactatttctacatgcaaaaacatagataaatctcaccaactaatgttgaacaaaagaagctagcatccatgttttcagcatccatgttttcagcatccatgtcttctttctttgtttactccctaattttggtggagcacaccctctaatagcttttctgagaaaagttatttggaatgtaaatttcctttcttaatatgtctttattctaccttcatgcttatttgatagtttcactgttaaagagttttaggttgaaaagctctttgttttaatgtcaaaagcattactccattgtcatttttattcccattcatttgtataacacctggtttttattctctagtagcttctcatcatccctggtatttcacaatgatgaaattcccctgcactaataattggtgggaacattcaatctggtaacttcttccctctgttattttttttcttaaattgtttcaatttttttccttcccttgatttctagaattgtattatttggatgttgaatctctgaactggtcctctaattttcgttttctactgttctccatttccttgctctgggatcaagaatatttcctcaactttattttctaagccttctatttttatttctgctatcatatatttaatgtttgaaattttccaaagattcttttctaagaaagctttttattgaaaaagaacatcatataaaaatttgcacaaattgtatatatagtttaaattttttttttttttttgagacaacgtctggctttatcacccaggctggagtacagtggcaccatctctgctcacggcaacctccacctcctgggctcaagtcatcttcccacctcagcctcccaagtagctgggactgcaggcatgtgccactatgcctgagctaatttttgtattttttgtagagatggggtttcgtcatgttgcccaagctggtctccaactaatgagctcaagcagtctccccattcagcctcccaaagtgctgggattacaggcatgagccaccacacctggccaataaatttttaaaaattaaatacgcttgcctaactaactaccacacaagtgaggaaatagtaacttaacaaaaccaagaaattttcctcctccccatatttgaccctcaacaaagataatcactattgtatcctttatcaccgttgattagttttgcctgtttatgaactttatagaaatagaaacatacaatagacgatacatccctttatgtctggcttcttttgttcaacattcgttggtgagatttatctatgtttttgcatatagaaatagtttcagcattttattgctgtatcttattgaattttatttttaatttcataaatatttttattgctgcatcccagtatattattatgccaaaatttacttactccttctattgttaatagactgttgagttatttctagtttgaaatatttgaataatgcggctatcagcaatcttgtacaagccttttgagcacatgggcacacatttttgttgtctatataggagtggaactcttaggtcatgatggcagggcaggcaagacccaaattggggcttagcccaggaaggttcttgtctttgctcaggaaagaattcaagagcgagccagtggtagaagaaaacagctgtattgagatggcaattttcatgcgtgtccgtgtgaagagaccaccaaacaggctttgtgtgagcaacatggctgtttatttcacctgggtgcaggtgggctgagttcgaaaagagagtcagcgaagggagatggattatcattagttcttataggttttgggttaggcagtgaagttaagagcaatgttttgtgggcaggggtggatctcacaaagtgcattctcaagggtggggagaattacagagaaccttcttaagggtgggggagattacaaagtacattgatcagttagggtggggcaggaacaaatcacaatggtggaatgtcatcagttaaggctatttttacttcttttgtggatcatcagttacttcaggccatctgggtgtatacatgcaagtcacaggggatgtgatggcttggcttgggctcagaggcctgacagcaatgttacagctccatgactcttcctgcggagcagggccaccccataggcattgcgcgctaagagtagcagctcaaaggcagttttgcagtcatatttatacccattttgaaaatgggtataaatttatcctacttatttatctgtagattgctttaacttgtttatgtacacgtggattatgtagaaaatttccagaaaagggtggtaacttccaggtcatcagttcactgccatggaaaaggggcagtaactttctggtgttgccatggcaatggtaaaccagcatggcacactggtaggcatgttttatagtgctccagccacattcctgtttcagctagtcctcaatttggtccagagtccaagccttgcctctggagtcaagtccacctcctacctcaatatggtatgtgtatattcctctatagtagatgttaacatggatttcaaaactggtggtaaaaatttacactcccataatcagtatataagagttccaattgtaggccaagcacagtggctcatgcttgtaatcccagcactttgggaggccgaggcaggtggctcacctgaggtcaggagttcgagaccagcctggccaacatagtgaaaccccatccatctccagtaaaaatacaaaattagctgggtgtggtggtgcatgcctgtaatcccagccactcaggaggctgaggcaggagaatcacttgaacccgggaggtggaggttgcagtgagccaagatcatgccattgcactccagcctgggcaaaaagagtaaaactccactcaaaaaaaaaaaaaaaaagaaaagaacagaaagagttccaattgctctacatcctcaaccatgcttggtattatcctttttcttttttaacttgtaggcatctggtaggtatgtaatggtaattcactgagattttaattcgcatttccctgccatttaatgaagtcgagaagctcttcacgtctttaaaagccttttatccattttttcgaattgtgtggtcttttctaactgacttgtagaatatttttcattttcagtgtatcattatccagtaatacatattactacaaatatcttctcccactccgtggcttgacttttcactttattcttttatggttagtgattattgcatccatttaagaaatattaggccgggtgtggtgacttcacacccgtaatcccagcactttgggaggccgaggtgggcagatcactttgagctcgagttcgagaccagcctgggcaacatggtgaaactgtctccactaaaaatacaaaaattagccaggcgtggtggcccatgcttgtaatcccagctactcgggaggctgaggtaggagaatcgcttgaacctgggaagtggaggttgcagtgagccgagattgtgccactgcactccagcctgggtggctgagccacactccatctcaaaaaaaaaaaaaagaaacgttagccttccaaaggccatgaaggtattttgctgttaccttctaaatgtatttacctttaatatttacatgcacaacccccttggaatttgtttttgtatatgatgtaagtagaatcatttattgaaaaaaccacccttcccctactgtgctctcgtggcacttttgcaatacaattaagagactgaatgtttatgaatttgcttctagacccttgatttcactggtttatttgtctctcttgcatctgttccatactgtcttcttataaagcaccagtaattaaatgaatccatcatcttggttcttcttcacaagtgccttggctatttctggtcctttgcattttcatatgcattttagaatcaacttaaagatttgcagacacacaaaaaaaccctgctggtttttattatgattgcgttgactctattgattaattttttaaaaatagcagctgtataatgttaagcctttcaattcattaatatatttcagtaacattgtgtagctctctgtgtcaatctcttgcacatccatattcctaaatatttcatttttaatgctatcagaaatcactgttttataaaatttgatattctaattattgctaacatacagaaattagactgattttgctattttgttattatattctgcagccttgctaagtccatttatttatcctacttatttatctgtagattactttaacttttttatgtacatgtcatctgtttttatttcttcctttttttcttcctctcttccttctcagcattcataagttttctttctttttcttcccaattttcactgaccagaaccaccagtattatgttgcataaatgggatggtagcagcatccttctttttccctcaatcaccaggggaaagcttttaataattcaccattaactgtgatgttttctgtggggcttatacaaatacataatattagattagaagttctctgtaaaggttctctaccaatttcatgaatacagacaaaacactcccaggacaagccaggcagaacagtgttattactcagatagacagcaagagcaaacagaagcctaggctccatggccagccagttctctaaggctcaggaaagctgcccaggatggatggagtctcctccgcacataacccacattgcactgcaactgaaggaaaccgcaagcgctccgccctgagtttccacaccctgggcaccacttggctcactgagcacaagcattgcaggacaccctattctaggaggaatcatgacatagcccggactgctgtggacacctcctccttatctcaagatgttgcattttcagttcattctgcctaagaattgcacgcaagagggggataaactcagttggccaaggtcgtccagggacctgtccttctgcattctcatatattcctagtatgctgtgaattatttgatgatgaatttaaattaatgctgctttttttgcttttattgagataatcttttgatatttttctcatttatctctgttaacatattaaatgacatcagttgattttcaaatattcaaccaagcttgaatttctgacatcaacccaatgtaatcatgattatcttatatatatagatatgtatatatctctctctatatatagatatatatagctgaatttgaattgctaataatttgggatctttcatcaatatttatgatagatattgtcctattttcccttcctcttgttatatttttatatcaaggttattctggcatcataaaacaagttaggaagtgtctcacctttttctcttctctgagagagtttatgtaagtttagtgttatatcatccttacacatttgaaatatttcaacagtgacgccatctgtcttggcattttattggaaagttttcaaattacaaattcaatttcttcaataaatctaagagaagtattcagatttctatttcatcatgtttacttcatgtttggtaatttgtatttctcaaggaaattgaaaaattagatgaattgtataattcatctgaattccaaacttattggcatgagttgttcaaaatgctcttttatgatctttctaatatatgaaagatctgtagtgatggtctctttttcattgttgaaaagtagtaatttgtggcttttctcttctgattaagtcttattataaatttaattattttcttaagttttttcattgagctaactttttcctgggttgattttctctgttatgcctgttttctctttaattaatttctgatgttatctttcttctttctttccatccattttctttaggtgtaattcaatgtttttcttaacttcaggagagacagaattaggtcataaattgtcttttataaattatgcatcaggagctacaaatttccctccaagaacagctttagctacctttcatgagtttcatgtgccacatttcactgttattccgttcatagtattttccaatgcctgttgtgatttctcctttaaactatgggttatttagaagaacaagaagaacactgcttaatttccagtagagatgttcctaattatcttttgttattgatttttagcttagttccactgaagtcagagaatatgctccctatgtttttaatattgtgaaataaaacttgatttatgaccctaacttaccatcatttttgttaaatgttacatataatatacctgaaaacaatgtctatctccaatttttgtttgaaatattctacatatgttattaagtacatattggttgtccaaatctaggattttactgattattctttctctttgttctaccattactgagagttttaaaaattttgtaactatgattatgatgtcatttttttgttctatcactttacatagtttgaaactggattattaactacatagaaatttaggattgttatgtcttcctgttggattacacattttatcattgtggaagtttcccctttatcttgaataattcttcctccttgaagtcttgtgactctgtgtttgtctagtattaacacagctggatcaaatggcatttctggttctgaatctttgaggaatcaccacactgtcttccacaagggttgaactaatttacactcccaccaagagtgtgtaaaagcattcccttttctctgcaacctcaccagcatctgttgtttcttgactttttaataatcaccattctgattggcataagatgccatcacatcctgtacatgtaccccggaacttaaaataaataaaaattatgttaatttaagttaattaaaaaatatagctataccacctctctttttgttagtgtttgcacggtatatttttcagacttttattttcagactttctgtgtcctaatattacagctatgtcttatttaagcagcacagcactgaatttttgatgcactatgagaatattgatttttaattaaaatatttagtctgtttgtatttaatgtatacactaatatatttgggtttaaggccagcatattactatttgttttctatccgtcctacctattgtttatttcttttgtcttttttgttgtcttcttttggattaacccagttaatggaaaattattccattaaatggaattccccaaaattaaaattattccattttcaccctctattaataagttataccttctttcattatttgttgtttgacctacagattacaacatgccccttgatagatcctgataaatctacaggatcaaaatgctataaattagtatcatacaattttcagacgattaacacccatgaaagcaggaggaaaattacttcagagaaaagcacagaaatgaaggaagaaatgaaaggtagaagaaacaaaggataagaaatggtaaatatgtgtggaaagtctaaattagtagttctcatctgaagtcagttttgcttactgggggacactggcactgactggaggcattttgaggcccataacctagggtggggaggatgctactggcatctagagggtggagactggggatgctgataaacatcttacagtgcctaaggcagctcctacacaaagaagtatctggcctaaaatgtcaacagtgccaggtttgagaaaccttgatctaagtgaatattgaatgtataaaataccaaaaataatattgtcttgtgaggttaaaatacttaattaaaagccaacaatagcacaagaggtcagagagagtaaatggagttagtgatctaaaattctttaattgtctgaaaattgtacgatactagtttatagcattttgatcctgtagatttatcaggatctatcaaggtgcatgttgtaatctgtaggtcaaacaacaaataatgaaagaaggtataacttattaatagagggtaaaaatggaataattttaattttggggaattccatttaatggaataattttccattaactgggttaatccaaaagaagacaacaaaaaagacaaaagaaataaacaataggtaggatggatagaaagcaaatagtaatatgctggccttaaacccaaatatattagtgtatacattaaatacaaacagactaaatgttttaattaaaaatcaatattctcatagtgcaccaaaaattcagtgctgtgctgcttaaataagacacagctgtaatattagggcacagaaagtctgaaaataaaagtctgaaaaatataccatgcaaacactaacaaaaagagaggtggtatagctatattttttaattaacttaaattaacataatttttatttattttaagttctggggtacatgtacaggatgtgatggcatcttatgccaatcagaatggtgattattaaaaagtcaagaaacaacagatgctggtgaggttgcagagaaaagggaatgcttttacacactcttggtgggagtgtaaattagttcaacccttgtggaagacagtgtggtgattcctcaaagattcagaaccagaaataccatttgatccagctgtgttaatactagacaaaacacacagtcacaagacttcaaggaggaagaattattcgagataaaggggaaacttccacaatgataaaatgtttaatccaacaggaagacataataatcctaaatttgtatgtagttaataatccagtttcaaactatgtaaagtgatagaacaaaaaaatgacatcataatcatagttacaaaattttaaaaactctctcagtaatgatagaacaaagagaaagaaaaatcagtaaaattctagatttggacaaccaacatggccttaataacatatgtagaatatttcaaacaaaaattggagatagacatacttttcaggtatattatatgtaacatttaacaaaaatgatggtaagttagggtcataaatcaagttttatttcacaatattaaaaacatagggagcatattctctgacttcagtgaaactaagctaaaaatcaataacagaagataattaggaaaatctctattggaaattaagcagtgttcttcttgttcttctaaataacccataatttaaagaagaaatcacaataggcattggaaaatactatgaaccgaataacagtgaaatgtgccttaaaacattgtcttttcatgttcattcttaaggatattttcattaggtatagaattctgatttgcggttatttcctttcagtgctttaccttcaaaaaagcaacaattagacttatagttaatttttcaacagaaattatgaaactgttaatccaccaccaccagcatcctcctcagctagtttcaagattttctcttggtcttcagttttcatcggtttcagcatgctatccttaggtatggtttctttatattcatcctgtctgaggtttatagcgctttttaaatctgtggctcaatatcattgatcagctttggactattcttagtcacaatctcttcaaatattggctctgctccattcttttctcttcctctctaaattcatatgctcagaattgttcactgtgtcctgtatatccttggtgttttgatatggagcttgctgactttcagcctcactcctaagtgatcggggtaggttccctgttgacaaaccttccatatatgcatctttgggtttttcttttcgtgctgctcagatttccaggaatggcgtcttccagtcttctacctggagggtgaagatttgacttctagctttctgagaggcttcaaaagaacgagaatctcagcatgtagcattcatctaagcatttggtagattaatcctggtgtgttcattatggtattattgtattaattgcagctggcatcttccagtctaataaccccctgttttacttattccacaatatctttatattaaaggtaatgagtttaaaatatctctgctaagtataatgattgctgcaactttgggtataaaacttttatcagccaatagatgttctcttctgttcttaacttcctgaagttatcataaatgggtattgagacttaacaagtgctttttctgcatcaagaaatcacatgattttctctattttattattatggcaaatctaccatccttactttcctggaataaaccctacatgagtctgaaatattttatatactgttggattcagttgactggttttgcttttgtttttgtttttggatttctgaatctatgttcattagtgaaatgggcctatgatctttctttgtattgtcctcagtcaagttgtgtagccaaaatgatgatataaaatgaatcgggcagtcttttttctttccactattttctggaacaccttgtataaaagaggaattagctgctccttggaattttatttttagaattcacgttaaccatctaggcatgtgaggttattagtccgttctcacactgctaataaagacatatacaaaactgagtaatttacaaaggaaaagaggtttaattggccagtgctgtgactcaggcctgtaatcctagccctttgggaggccgaggtgggtggatcacgagaacaggagtttgagaccagcctggccaacatggtgaaaccccctctccactaaaaagtacaaaaattagcctggcgtggtggcgcgcctgtaatcccagctactcaggggagctgaggcaggagaatcccttgaacccgggaggcagaggttgcagtgagccgcgatcgcgccactcactccatcctgggcaacagagtgagactctgtttcaaaaaaagaaaaaaaaaatggtttaattgactcacagttcagcatggctcgggaggcctcagaaaacttacaatcatggtggaaggggaagcaaacatatccttcttcagatggcagcagcaaggagaagaattggaacccagagcagggggaagccccttataaagccaccagctctcatgagaacttacctgctatcacgagaatagcaggggggaaactgcccccatgattcaattcctcccaccgggtccctcctatgacacgtggggattatgggaactacaattcaagatgagatttgggtggggacacaaccaaaccacatcatgaggtttgggaaaaaataagtctttgcccagttttaatttatttgatatctgttggtctttcaagttatctctttgtccttgcactaatttggggatattatatatttttctaggaacttaattacttctgtgagagttttcctctactggcatacatatataatattattattttactttatttatattcctagagtgtctgtggttatttgctctttctcattcttcatttgcagagatcagatgtcagcctacattactaatttttttcaaagaactagttttttgtttgaaaactcatatttaattttttctctatgtcatgaacatctgccctttattcattttttttggactttccctattgtgccttttcaaaagttgtgagttgaacattcactatatttattattaacctttctggtttccttattattgtatttaaaagctaaagaaaatccttgtaagtgctatgtttataatgaatcactactttcaacttttgaaaagtaggatttcattatcattcagtcctaaatattctttcacttattgattgatttctttttgaacttggttcaattagtaatatatttttaatttacaaatacattgactctttcactttcatttgttattaatttctactgattgcattatggcagagaaagtagccataaagggaaaatatagctattggctatttggaatgtattgacactgcctttatggctaatacattgttaattttcttttattttcctttatttttttgagacaagatgtcactgtgttccccaggctggagtgcagtggggcaaccgcagctcactgcagcctcaatctcccaggctcaggtgatcctcccacctcagcctcccaggtagctggggctacaggcacacatcaccacacccagctaattttttgtccttttttttttttttttttttaattgacagagttttgccatgttgctcaggctagtctcaaatggctggcctcaagcaatcctcctgcctcagccctgcaaaatgctgggattacaggcatgagccaccacacctggcccattgttgatttccgtaaatgttctgtgtgtgtgattaagaagacgctgtctctgtctctgtctctttctctgtttctctctctctctttctctctttcagttctatatacgttctatgacctcgagcaggtattatactgttcaaatttttgtatctctgcttatttttaatctacttgatctaatagttctgaaaaggctgtgttaaaatcctcaaaaacaactgaagttttatgtaattctcttgcagtgctatccgttgttgcttgatatataaaggccatatatagttatgttagatatatatttttgttctattgttctttttgcagttatatagcattttgttttgttgtaagtgaatttttgcctgttattttatttttttttgaaaattaaggttgctacaccaactttctttgggttgatatttgcctgttatagcttttttcatcttatttccaaacttcctttacctttccatttcacgagtgtctcttgtgtacaatatattatagaatttttaaatccaatacatttactataattactaatatattagaaattagtctaccttcttatctttcctttttttgtcttccaatcaaatagattgagtttacttctgctgacttagaatacagtttccccactcctttttatgactgtatattattccattgtgtgaattttccataatttatttaatgaatccactactgatggacattcaagttgcttccaactgtattccaatcatacaatcatattctagttcaaacagtgaagaaccttgttcatagtttcttttttttctttcttttgagatggagtttcaccctgttgcccaggctggagtgcagtggcacgatctcggctcaccgcaacctccacctcccgggttcaagcgattctcttgtctcagcctccctagtagctgggactacaggtgcccgccaccacgcccggctaatttttgtatttttagtagagacggggtttcaccatgttagccaagatggtctcgacctcctgaccttgtgatctgcccgccttggcctcccacagtgctgggattacaagcgtgaaccaccgcacccggccccttgttcacagtttctaatcccagctcatcttgcaggtttgtctttctggatgcctctgactccaagcattgatggccctctcacaggctctgtcttaggttggattctccagaagcgggccctgagataaggttcatgtgaatgtggcttactaggacccaaccccaggaaaacctggtgggagagtggggagcagaaccaggaaggaggccaagccaggtgcagtttcaagctcatcaccagggaaagtgactttgcttcagtccacccaacacgggtctttcctcactgtgcccagaccagggcaagcacactacagtgtttatagccctgctccatctggcattgttaagggggacccctaaggagacataaattccaggcacttctggtgagcatcaaaggtgaagaaccctaaaggcagactgtggacagagagatgcaggcaatggctttggggagctaatatgtatgggaatgccctggctgacataaccttgtctgttgcagtgtcctggctcctaactcagtctgagcaaatgaaggagaatcaggaatttgaaggaagttctctaatgtcttccattttcagccttagaacagtgatgggctttaaagcaaggcacctctatgcagacgcttgtctaccatgtatagatcatgacatcataggcaggacatcagttaactgttttgttttgttttgttttgttttgttttgttttgttttgttttttcagactgagtctcacttcgtcgcccaggctggagtgcagtggcacaatcttggctcactgcaacctctgcctcacgagttcaagcaattctcctgcctcagcctcccaagtagctgggattacaagcgcccgccaccacacccggctaatttttgtatttttagcagaagcgggatttcaccgtgttggccatgctggtctcgaactcctcacctcaagtgatctgcctgttgttttaagccacattttcctcatctataactggagatgacactagttcttatagcagaaagcttggcttagtgcctggcatagagtaagtggccacacaagttcctgtcattattactattgtgttgttgttgttgttgttgttgcttagagacagggtctcactctgtggcctggctggagtgaagtagagaaatcacagctcactgcattctcagattcctgggctcaagccatcctcatgcttcagcctccccaaatagctaggactacaggcgcacaccaccatacccagctaatttttatttttactttttgtagaaaccgggtctcactatgttgcccaggctggtcttgaactgtttgcctcaagcaattctcctgcctctgccccccaaagtgctgggattaccaatgtgagccaccttggttggcccctattatttagcagaactttcctcagtgtctggcaaacaagacctaaaggactttgagctgcttaaacaaccactagaaagcaccttaagaaacaaagatgcccatgtatttactatttatataaaatacataaacaggaggaaatcacataaatcacaagctgctatttcccttagaatctacaacaaccatattattttatgaaaaactggaccatattaaattactcaggcctcggaaatttgtaaacgtgtacaattccgcattggaaacagccgtttatatgtactgtcacttaaaacacaaattatggttattgtaaaagattttaattcacataaatttacgggtaaaaaccacatatctaggagagaactactcagggcttgccacacatataaagaggctgccggaagtcccggcagctggttaccgtctcttatgatgacaggggctgggtaggatggaggataagaagggaaggtgccaggtgcagcggctcacacctgtaatcccagcacttcgagaggccaaggcggtaagatcacttgaacccaggagttcaagaccaactgggcaacatagtgggaccccatttctacaaaacgaacaaacaaataattagctgaggtggtggcatgcacctgtcgtcactgtagtcccagcaacttgggaggctgagatgggagaattgcttgagcccaggagggcaaggctgcagtgagccatgattgcaccactgtactccagcctaggtgacagagtgagaccttgtctcaaaaaatatatataatttgtagcatctgctacaaatgtttttaaaatgtactgtgactcagaacatggtgaaatgtatgattatgtgaatccattttagaacccaacttttattacaggaagcagaataccttggaacgttattacttctaaaacttttttccatgaaatgaaccttgaaaactatgctctatctaataggtctctggacaattatatataatcatctttcctcttagaaagaactactttttaatccagttctccttatccacatgacaagtccatcataactttgacacatcatataccctgagccagtagtctaatgtatcataaattaatgccagcaccaatacaacattttgatcaccatatctgttacagaaaaatctaaatgtgttaaaaccatctgataactctgccctcaagttttccaggccatttaattattaaatttcccttgtgaaagggatctgtattgtatgcaattcagacttcggtggatggcaagggtttttttcctgaggtcaccagtgcttttaaccactgcctaaagagcatcctgtgctgattaacatgcctcggattaactagatttcgcatgtggcaatcatactccattcagcagggcccatctctggtgaatcgtggacattaatgacagttgcaagagctcaaatattatataatcactaattacattctgtgcaattagtggaggctcatcagtgtgaatcactaatggctgatcaccctgttctctctgggaagaaatagacggtctgcataattttctgattgtattagcatagacacaaacgttattaacgaactttggcgaccatgaagaggctcgatgcctgtgatggacaaaggcaagaggctccgcttgatgggcacagacacttcattttgaacatgagcactgtgtttgtggttttctggtatgactcactcactcctcaccttctgaatggaaactgcacgcaacatcttggccactcagccaataaataacttgcacacaagtccagtttaaaaaaaaaataactgtggatttgtatttttcttaaatcggttttcagagagccaagctttaagaattgtgggacatttaaatatatagctggtgactaaataggagaaacacctctgaaatggtagagagattatctgaattttatttaaccctctgtatgttgggccactatattagtttgccagtgctgccgtaataaaatatcacagtttggatggcctaaacaatagaagtttatttctcacaatccacaggctgaaagtcagaggcaagtttggcttctcctgaggcctcctctctccttggcttgcaggtggctgtcttcttgctgcgtctccacatggctttttctctgtgcgaaggcatccctgatgtctctctgtgtgtgtgggtttccttttcttatcaggatatagtcagattgaattagggctcacccatatgactcactttatcttaattacctatttatttatttatttctgagacaggattttgctctgtcgcccaggctggagtgcaatggcgcaatctcggctcactgcaatctctgcctcccaggttcaagcggttctcctgcctcagcctcctgagaagctgggattacaggcacatgccaccatgcccagctgatttttatatttttagtagagacagggttttgccttgttggcctggcaggtctcgaactcctggcttcaagcgatccgcccgccttggtctcacaaagtgctgggactacaggtctgagccactgcgcctggccttaattacctctttaaaggagctatttccaaatacagtcacactccgaggtactgggacttgggctttgacctatgaattttgggagaacacaaatcagcctacaacagcagaatgtttacaaactacaaatattctaacccaagacgttcttgctggaagactgacaacgggcttgactacatgaacatcttaagggtgtcctttggtggggacctacactgtccaaaatggtagccaacagctatgtgtggctaccatgttcaatagccaatgtgactgttgaacactgacatgtggtgagaaaccgaattttaactaatttaaacttaaaaactaaagaagggtaaaactatttttctgctgaagacagctttattgggttggtagaaacacatttaattgcaatcattacaaatttagtgtctggatagagatgtgataaaaatgtaaaatacacactggaattcaaagacttagaatgaaaaaagtgaaatatttaataatttgtatattgattatatgttgaaatgaaaatacttttaatgtgttgagctaaattaaatatattaataaactcaatttcaccagtttcttttctttttttaataatgtggctactggataattttaaatgacaggtctggtttgcactatattcctcttgaacaacattgggttagagctttagctcattgctcaccaaaagtgggtcagcaaataccctaaaatatgcattccttttgccaaaaagattaaagttccaggttcttttgtgtcctctgtacaaagattaagataactgaaaccaaccatttattcttggatactaatatattattaaatctcccattacttgccatatttgtaagttttctcaataatattttcaacattaaaatcttgttaaagatacctatatataagaatcagaaataattttccatgtaatgaaatgattctttcttataaatcaatccttctatgctggtgccctggtttctttttttttttttttttttcccaaaatgccctggcttaatttgtcttcccatcctacttgccatttgtttttctgtcctcctgcctcagttgctaggaaattcctaagcaaagcatctgacgtctgatgaggtccggcggctcacacctgtaatcctagcactttgggaggccaagtagggaggatcacttgaagccaggaattcaagaccagcctgggcaacaaagcaagaccctgtttctaagaaaaattaaaaaaaattaataattagccaagcacggtgtctactcaagaggctgaggcaggaggataacttgagcccatgagttagaggccgcagtaagctgtgattgtaccactgcgctccagcctgggcgatagaaccagaccctgtttccaaataaataaataaaagcatctaatatcctttctttcttctatttaacacaggctgaaaactcactctaatttcttcatctgcagcatagaagagcaaagaaagcccatggagtctatagttatggtacaacttttagataggcctgacacggtcagtggtgggacagtgggggttttgaagggctgtaggaattgaattctaaggttttgtaaaagactttgagggtgatttttgtaaatcactctacttaacattacagcattaaaaagtaaagaattaaaagttaaacattcaaacaaggtaaaagattcaagatcagaataattggttggttttctctaaccctttcttaagcagcttaatccccaaatgtcataaagaacaactaacaaacagcagacggaacttctggacacctgaccccatgacacagttcattattaccctcctgtcagtcccccttagcctctgatagggaatatctaaaattccctaaatgaccagagaatcagtctagtgtcacgtcatcactctaaaatataggacaaggggaacgatcaaagagacagtttttgccttatcactttgttctttctggcatcagtcagcctttagaataacgaaatcaatgcaaacatttgttgggagatgcctactttgaagatcatttgctacctaactgtcttggtcatttacatggaatccagggaggatttcaaagattctctctcccttgttactcagataaaaggaagactcaggtgttgagtttggttttgtgtgtgtgtgtgtgtgtgtgtgtgtgttttaatatttgataaggcttctatttcacactcacaaagattcccatgtgggttttatttctttttgtcctttaattgaagttatgcagattgaatcaaacatgacaaatgcattcagacccaaaaaaggaaaaaatatttacagccagaaaagtaacatgtaagagtgtggtttcctatagataaagcaaatgtttttcagtgtgtgcagtagaagtaatacattgcagagtgccttacattagaaaatacaagagaaaaaaaggttggtaaacatagccagcagacagatatgaaagatttacttaccaaaacttgggaggggaagatgaagaaagggtgtacacgaataaagtcctcatctgatataacaagttccgtagaaaatgtggaaagaaacaaaatcaagaactagtgggaggccatgttaattagagttatggaggcaactactggaaaacagagaatcaaagaaagtttaaagttgttgaagggattttgcttttcattggatgacctttggcactctttggttttctttaatacatacacaagtattattttcagaatatctttccatttgagaaataacaatctgaactctgcatttacatctctcatttacttctcacccactgtcatctgcctcacattccccaacccattaccctccccttgcctaaaacacccatcctctttcttttcctctttccatcccaccatgcttcccttgcaaaccaccagaagactttcataacgtcactcaatctgctgtctcgaatgacctcttaattagcaaatccaagggacactattcaagtgtgttcctcaaggccctatcctctctccttttctcttttcattctattcactctccatgagcaatatcatccttacccatgtatgtaaccttacatctatgttgatggctactaaaccagtctgtcttctccatagtattagttatctaccaacagcctggtgaacattacagatgataggattggcccttcaaactcaatctgtccaaatctcaagtctccatcttttcttctccaatctgctctcactctacatttgctgttttggtaaataggtcctaccctgttacctaagccaaagactagagagttatcctagatttatgcatctcactcatgaaacactggagacaaactcattaaaacatataggactcacagataggaaacctgtaaaaaagaagacattcaagaagtaccatgcatttaagaaaaataaaaaccataaaacagaagaggcaaattcaagaagcaaaagaacaaacacctgaagaaaagaaatgtttgtcttcattcacaaatgatatgatcgtatacgttaaaaatcaaaaaagtctacaaaaatttactagaactaatgaataaatagaataaagcagttggatacaaggtgaatatgtaaaattaattttattctgtatatcagcaacaaacaggtggaaaataatttgtaaatgccatttataatagtatcaaaaacattaaatgcctgggaatgaatgtaacaaaatatgtgcaagacatttacactactataaagtactactaaaaaatctaaagatctaaataaatggagagatatactattttcatggagtggcaaactcaatattgtagatagcaattcacccccaaactgagctattaaatcaccatgattctaatcaaaaccctagcaagccttattttagaaatcaacaagttgatgtggaaatgcaaaggcactagattagcaaagacaatcatgagaaaaaaaacaaagcaggaggacttatactactagcagagtttaagacttattacaaagctgcatgaattaaaacagcacatctatgccaagaaaaaacaaaacaaagcagtgtatctgtgcaaagacatatagatagatcaaagtaatagactagaggcaaaaaatagacccataaagtcaattaatttttttttttgagacagagttttgctcttgttgcccaggctggagtataatggtgcaatctcggctcactgcaacctccgcctcctgggttcaagcgattctcatgcctcagcctcctgagtagctgggattacaggcatgtgccaccatgcccggctaatttttgtattttcgttttttttttttttggagagacttggtttctccatgttgatcaggctggtctcgaactcctgacctcaggtgatccacctgactcggtctcccaaagtgctgggattacaggtgtgagccaccacacccagccttcaattgattttcaatgaagatgctcaacaactcaaagggaaaagaaaaacattttcaataaatagtatggagaaatttgaatttatatcttaaaaatgaaacttgacctcctacctcacaccattcacacaaaaaaaattaagataaatcataaacctaaatgtgaaagttaacatataaagttcctaaaaatatataggagactatcttcatgatcttagagtagagaaatattttttaaggcacaaaactttaaagaccattagagaaaacatctaataaattagacttcatgaaaatgtaaaattttactcataaaaaaaaaaaaacaccattagccaggtgcagtggtgcacaccagtagtttcaactactcaggagactgaggtgggaggatctctagagcccaggagtttgaggccagactggaaaacagtgagactctgcctggagagaaaaaaaaaacaaaacactattaatatagtgaaaaggcaagccactcactgggaaaaaatactctcaacctgtgtttctaacaaaagattcacatacgtaatttacaaaaactcctgtaaatcaagaagagaaagtcaaacaacccaattcttaaaatggacaaaagacttgaacaggtacttgcaaaataatatatccaaatggataataaatatatgaataggtgttcaatacaattactcatcagggaaatgtaactaaagaccacaataacatcacttgagatgctgaaaattctgatacataccacaatatgaatgaatcttgaggacattatgctaagtgaaataaaccattcacacaaaagacaaatactgtatgattactcttatatgaggtacccacagtagtcaaattcatagagacaggaagtacaatggtggttgccaggacccggggggagagggaaatgggcagttattttttgtggatgcagggtttcaattttgcaagataaaatgagtgctggagagggatggtggtgatggttgtaaccgtattgagagatgatggaacgttaaggtatttgggtcatgaggaatccaccttcatgaagggataaatgtagcgtctcaggagtgaatgagttttcactctcatgggactggattggtggcagcaagagcaagttgttaaaagtgaggttgtcgggcatggtggctcatgcctgtaatcccagcagtttgggagaccaaggcaggagaatcgcttgagcccaggagttcgagaccagcctgggcaacattgtgagaggtagttcctataaaataaaataaaattagccaggcatggtggtgcatgcctttggtcccagctattcaggacggggaagcaggaggatcacttgagcccaggagtttgaggctgcagtgagccatgatcacatcactgaactacagcctgggtgacagagcaaaactccactcaaaaaacaataagaagaaaataaaaataagtgtggttgcctctgatgttttgtcctctttgcatgcacacacttctgtttccacttctccaccacgttatgatgcggcacatggctctcagcagacactgaccagatgtggccacccaatattggatttcccaaccccagaatcatgagctaaataaatatttttcatttataaattacccagtcttagattttctgttatagcaacacaaaaatggactaagacagcccactttacagcaaaaatgatgcagcagtagtttcatgcccagggggtctacgagtcctgctgcattcaacaccaagaggaagctgccagcctgatcaatgagttatatcacctgctcaaggcaaagccaatgtgcgggctgagagataaacatcttaccaggatgaggctgttttccagaatatggcacacagcctaagtcaatgacccttatatggtactgtgtccccactagatgaaataaatagattttgggaccaagggctgaatatagaagtagcctcacatatcatcacttccagtgatttgtttagaaatacgtgcttctcatgtcttcaaacctagtttccgtgggtgtagacattctgctacccagaaggggaacacttccaccagaggatgtaagtatatcattaaactttatagctgtgaatgccaactgtgggctcctcatgtcaagagaccagcaagcaaggactggagtcaccattttggaaagcatcaattaaccctgatcatcatgaacagacagggctgctggtaagcagtgagggccgggaggaatgtgtgctgcatccactgagtgcctctaggcgttcccttgcccagttgtaatggtaaatggacaagcatagcagccacagtcacagaagggcatggagaccagaggctcagactcctcagggacaaagatctgggtcaccccaacaaggaagtttcctagaccaggacaggtactggctgagtctgagggaaatctagaatgaagaatgggggaaggaaaagatgagtatcagcttcagtcctaagttagctacattactaggagctatagttcatcccactaactttcctcttgtaagtttccccaggaaaaaacattgagaaacatggaaggctgaatttacatgcagcaagcagaactgagaggcacaaaccccattctatagaggacgctaggacactacccagattcctgcttcaggacgggtgcatgcactgcatgggtggactgcattttgcctccttaggacttacttttgggtccctctccagaaacagctcttagctgatggcagctgcctggcccaagcttcagcccctctttgaggacaatgtacatccaatgatcactcactgcaagggtacaacgtgaaaggctgctggactacaaatctaagcatattcctttgagacagtatcaatgcactgagatatacagaagctcattcatttagcaaatattaagcatagactacgggtctaaactatttcaggagcttgatatatatcagtgaactaaacacaagaattcctgcccttctggagtttacattctagtgggaagagatatagtaaacaatatacataataaagtaaattatggccggcgcagtggttcacgcctgtaatcccagcactttgggaggccaaggcaggtggattacttgaggtcagaagttcgagaccagcctggccaacatggtgaaaccttgtctctactaaaaatacaaaaattagccggctgtggtgggcgggcacctgtaattccagctactcaggaggctgaggcatgagagtcactcaaacctaggaggcagaggttgcagtgagccaagaccacacccacttgtactccagcctgggtgacagtgagactccatctcaaaaaaaaaaagaaaagaaagaaagtaaattatatggtatgctatgaaaagaaaaagagcacagataagaaagatgaggggcactgaggaatggtggatggctgcaactttaaaatgggttgtccaggtagatctctttgagaagatgacttgaaggaggaagcatgcaattatgtgggaggaaagaataccagcagagggaaccagtaatgcaggggtggtaaaacgggctcagacctggcatgtttgagggacagcaaggagaccagtgtagctggagggagggagtgacaggaagtacagaaggagagaaggtcaagagggaagggtggtggggcagagaggaggggcagactacacgtggccttgaaggccattgtgtaaagatcttgacttttactctgaagaatatgggcagctattgaaagattttgatcagactaatatgatcacttctatgttgagaggactattctccctgccaggagactccggcaataattcaagtaagagatgatgtggctcaagtcagggggtggcagtggaggtgatgagaagatcctagatacattttaaaggtgaaggcaacctgattccctgatgtattgacaagggtgtgataaaaatacaggactcatggatcactccaaggtataaccatttatgtagcatctagctagtgtaagtggatgggtttgggagagcagtgggagtgagggaaggagtccagaagtttaggacatgttaagtttgcgatgtctaatagactctgtagcagactgctggtgctctgctgccaaactagagatgcctaggagtttatgttttcccagagcagtgcctgaagaatgactgataaatgcaggaatataatagcccagctcccattttttttgcactggggcaaactaccaaccttgtggtgtgaacagccctgtggataaggttaaagccacgctccacggaactttgcctgagatcacactttgctttgtttcctcaccttctctgtcctgtcctgcttcacacacccccatgctagtctcctaagagtagctcctaatggatcacatgtacacaaaccctcgtctaaggtcagctgctgaggaaccagatccaaaatgatgtccaagcagacatgtcaagctcatgacagctgtttcagctagaaaaatacacttggatgtcaaccagatgtagatggaatttaaagctacgagacaggttaaggtcaccaagagagtgagttggtgttattctttcatcatagagatttcaagatagaggaaagagtgaaaaactttcatcttaaaagtaattcaggggagagtaaagttggcttattcttttttaaatattatgaaactgtaattacaatttcatcatacaaaaagtcagaagttaatacttgaagctgggccatggttgtccagggaatcattataccattcttattatttatgttcatgattgaaaattccacaataaaaattatataagtaaaatgtaaatacactcacctttaaaaaataaataattgcatagtaaaaaactagaaacaatgcaaatgtccatcaataaatttatcgacatgatggaatactatacagcaatgattatgacaaaccataactacatgagataatacaagtgaatcttatattgttgcaccaaaaaactcagacgcaaaagagtacatgttgtatgatttaatatatgcaaagttcaaaaacaggaaaaattaacccacactgctagataggagtgtggttatctttgggaggctattgactgaaggggacatttggggggcttctgtgatgctgctgatgtttttttcttcatctggtgctggttacatgagtgagttcactttgtaggattcatcaattgtacacttattgtatgtgtactttgcaatatttactttatcattatgaaaactctgaagagtctgtgattttagcctgccacaatctcatggatactggtagaagacacaagatcctaggtcagagacaaaggactttattattcacaggaatcataagcttctgtttgtatcagctccctttaaccctcaagacccacaggggtgacgtggagattagccctggtggaagctgcacacgcagtgcatttgcatcagacaatcttagcctaggaaacatcagtctcgtaaagggactctaagcaaacgctgcttaaactttgtctcagaaggagacattatttttattatactgcacagcaaacaaatctgcccctcctcagacagagacccatctctaacttccaaggctattcactatatgaacatatttgaaaagatagtctagaacaaaacctgttagtgcctttgttcacaagacttgcagaaacatgagagatctatagagaactgcctctcaacaatattgcaatcaaaatgtacatttacaaagtcatttaggtaaatcattacagacaaggccaaaaggaacttcgtttgatattccacttctccaagtcccagaggtgatcatggcttgtttggtgcatacctttccagactattagctatacaatcacaagtatctatatctatatacgtatagatatgtatctatatatatagagagagatacatatctatatagatacatatctatatatggatacctatatatgtactatatatatagtacatatatagtgtatatatagtatacactagtatatatatgtatatatagtatactatatatagtatactatatatagtatactatatatgtatagtatactatatatagtatactacatatacatatgtagtatactatatatacatatatactatatatagtatactatactatacatgtactatatatatacatatactatactatacatgtactatatatacatatactatatatatgtatagtatacatatatagtgtatactatatatgtatagtatacactatatatgtatatagtatacactatatagtatatatgtactatatatagtacatatatagtatatatacactatatatgtactatatatagtatatatgtactatagtatatatatacactctatatgtactatagtacatatatagtacatatatagtatatatgtactctatatagtatatagagtacatatatagtatacatatatatacacacccacacccacacactatatatgtagagagagagacagaaacagagatagagacagagagacagacatagagatagagacagaaagaagttatttgggggcagtatggattatgaattaaaaatttgacatcattctcttcatgtcattttgcaacttgttttcgcttaacaggatcttggcatttttcttttccttctttccttgccactatatgccaacagatctcccttcttctaatctgctgcctagagagccatggcatggatgtgccatggtttaattaaacattccccttttgaatgggttcagttttttctttctcttattgcaaacagtgcttcagagaccattgtcagacaggtctctataaatttgtgcaaatatctacttagagtggcttgaggaaggacaaagaagaaggactgctgtcaaatttaccctccaaaaacatcatcccagttacatctcaatggtagcttatgaaagtgccatttccccatgaccttgccaaaatgaaacattgttgttcactttaatttttgtcatttggaaaggaaagaaaaattacatcttgttggcattttagtttgcattcccccagtctctagtaaagctgaacatattttcatgccttaattcttaaattaccatttcttaacatttatgtgcccagaactataatgggcactttacgtgaactatttcattttatcttcacaattcattcctgatataatagtgaggaacgagcaaatattttttcccaggtgacagatgagtaaactgaggcttagaagctagggaactagcgtggattcacacatcaagtgtttatggcagcaaactcctcctgccaattaattacacagtacctgttctcttcttctttagtaaaataatccaaactttaaggggagcagcaacgtgtccagcttcaaattcatacctcccagccttccctgtaggtagaaatggtcatgtgattacattgttaccaatgcattacagctgcaagttgagggtggagctgtttcccaaaaggctccttgaaagtaggagtagttcttttgcctttcccttcctcctccttcctccttcagatgagatgactgaaactgccgcagtcactataggaccgtgaataaaggtggcgtagaaagataaaaagaacccgggacattgatagcatcatggggcctgttctcctccaccctagtctacctacgtctagaattctggttacgtgagcaaacccactctgcatttctgttattactgatacagtgatggagccaggatttgaaccaaagctatgctgagtcattccttctcatccaggtaacactctccacacaaacgctatactattactacagaagtcaccatctgtggccaataaagactggagaaatcttgctccagctattctttctcaggacaattggagttgcaagtcttggaagtaggaataatttcaacctcataacagcaatagaaaaggtagtgcttgtgaaagataaaagtagaaatagcctaacacagcataactttctttattgatagtatctacacagggaaatgtggatttatagaaaagaacaacatgtcaaatgattacaaacagaaagttctgattctggcctcactgttgtatttgctattgaccttagaaaaataacagtttctatctgtttcccttttcttacaatgttaataaaatagatctttgagccatgggcttgtgatgagagtccaatgatgaaatatacataaaagcttttccaaaaaaaaaatcaacatgttcggtgctctgaacctggaaggaatcactatacgaatactgcattcctagtgtatgtgtaacccatgcacagagaaccctgtggttattattatcagattgtagcgaccccaattttcttcctcttttttagccattaagtaataggagaccccatgagacacaggaataatgtcagaatggagcaacattgtcacagtgaggagtaggtgtgcccgtgtatgtgtgtgcatgtgtgtaagatttaacctttttctcattgagtttcatatatttcatgcaaaggattgctgaatattcattgatgtatctagtatccacaagtatgctattagaaatgtattatttatctatatttttgaaaggttgaaataattcagtgttgatcctttgcaagataggtttgctacctttaaactgaagtgacaataacacccttcggtttctctcaagttgtgctgatatccttgatgtctctaacaaaccagagactgcctgtgagaatcctgtatgtcaccattaaattgaaaaaggcttgaaatatcaaaacctcacttctggtagggaagggaaacgagaaaaaagcaaaccgatggttattcatgaatcaccccgggcctgccatgataaataacagtggcctctttcttctcttcgctgggctcgtaattctctccctgaaggtgttttacctgcacaggaagaattgggctggagggatgtctagtaaaaatgatttttaaagcctcttaaaacgcaaaagcctatgtttgggttatgagtcattctttttgcatacagcaaacaatgtccaattaatctcagccgactggggagatgggactaaaacaatttgcaatgtttagtctgtggttttgtgacaacctagtgatgttaagagaaaattaaatactcgataaaatagcttatttgaaaagattacaagcgaaggcgtctagatttgggcttctcctgcaacattaaacatgaggattcactgtccaaatatgggttccgcatataaggtaggaaatatttatgccatttccacattaaaagggtagcatattatttgtaatgaaatacagcaatacaaaaataatcagtcaaagtgcagcttcagtgtgtttttatgtagacgtctgaatgtctttccattgtttcagcagagagctgctgttttctcctgcgctgacaggcaatgctatgtgatatgttggcaaacaattttactgttttcctctctcttcttatgaacgatatttatagactccgaattgcatttggttccgctttccgacacagttatcttcttgggcgtggattaaatgaagatctgggtgttgaaagacatttacataagtgctgtttgtgaacaggaaggccagttcttctattatcgccagaacatttaaatcttaatgactggcattgttgtctaaaagacggtgtttttcctgctgagaaactgcattagattcaagaaacgaagctcatttccattctctcagcagtcttctctagaaatgacatgcagtgcttgaaactgtttatttccaaattcaggcctccctcgcatcagtcatcagcttcaattaccagttttccggagccgagccatcaggcagtctgacaccggggtccggcctaattcccaccttctccagagtcaagagcataatgtgcggatgaaaaggtgcaaaatagcttggacttcattagcatgcagggcctggctgttcatttgccggctgcggatggaagttctgacactcggagcttgctgcaaaatgagaaaagtcctcttcaggggagatgaggtccttggtggtgaggaaaggtcatcaaaaagacagccgctgcccttgctccctgctctccatgactgcttattgattccaggaacacctcattacacgccggatcaacatattattgccatgttctgggactgaattgtttacaagtgtctttatcgccagcaaaggcctgcccggagatgcatgactacactcatttggctgtgacccgccaattatgtgttatccgatatgttgctgggtatcttgatctttgcccgggtcttctcctggcatcaacacagtcccatttactacttctttctaaccactctttgggaaagtagccattagcctgtcagtgtgtaaatgtgcgtgtgtgtgtgtgcgtgtgtgtgtgtgtgtgtgtgtgttacctctgctacaggaaatctgagcatcgatgctccattgcttgctattcatgaggtgcataatcatttgggggaaagaaattctcactcacactcacacacacacacctttttttatggcatccagggtaacccacacaatttgcaatcagtatgcacaacagagagcataatgcagcttgttagcagctccctctgcttacatataggcccgacgagagagccgtcatattttatttgggcatagctactgcaaaccactgcacaggaccattttaatctttcattacagacacttctatggctccataaaagaaagagtggactagcaacttgattaaaaacttagtaaagagattgtgcaaaccctcccatccctgaaaagtggagccacagccttagtttcttactgacgccactctgcaatgcaaatgtgacttccatttccctccaatggtgactactgacataaatttaatgatgctgagaattgacaacttctattaatttttgtgaatattgcttggagaaggtttaacgactccaccaaacattaggaccgtctcaaccaaatactaaaaaggggtccatttcatttacatttcctgttgccatcaagaatggctctttaatgagttttccgcagcaggatgtagagacacagatgccaagaaacttgcctttattttcttggaagcatatatccttggcaatgggcacatattaatatgatgagtgaactgaaactcaagaatctaactgccttcagaaaagtgacatctgtatgcacattcatttccagcaatttcccagatttctttggtatttgtctttctttaattttttccaggtattttttttctctttccaattttgagagaggagttttgtaaagatactgagttcttttggttctttccaaaatcccttagttttggctttctgacaaatcactattaataactggaaaaggctgattaagaccccctcgtcagggtgcttcaactcaattaaagagtccatcaggagatgtttactccacccagtgttcaaggactctgctaattctgtactattctgtactattatcaaccaataaataccctttggaagagaaagaggtgattggaaggattactcttggtttatttcggggggtactattgcacgagaagcttgatcaagggataaagatggaacaaaaaggagtgtttaccaacattcgtatctgacgatcaagtctcagtgtggttggaactcagagaaggacaaaaagggtaactttcaataactaggagtcatccaaaaggaaaggggcttctttacaaatttacaagaaattgtaatgatgcagcagtgggaatgcccaggcggtaggcactttgaggttgaatgccctaggtagaagggagagccacatccaggagcttctgccaattgttataaccagatcatctgttatttcaatgattaaagataattcctctctgttatggcttaaatggctcatcttctttatgaatccctcaaattggcaccaaaagattcttttcaattaacagaatggccagtcttcctagatcctctggatttcttcccgatctttaggagttgcaggcttctatgtatattttctgatgctgaatagaaaatgcatacacacagtctacaagaacagtggtgtgattagatgatcagatggcaactaacccccaaaaaagagcttgttttaaaaatcatttattaaatacaactttgtgccaggaaactttctagaaagttagcatacattaacttatgtattactcacaacaaccgggtgacttaagcattgctaaagttgctaagtcacccacctttacagatggggaagccttcttgcacatctaatagggttttccagtgtgctcaaggtcatgtggcagaggcagaattaaaacccggatgtgacccatggcagaacccacactctattctgcctcccctagagccagcatccactacacatttccaagaatcctgtaaagcacccttttctgcataccagccaatgtgaatgcagaaagagtcgctagttgtgataataaatatgtcaaaacaattatcttttacctctctgatatcctttgccatgaggtgggctatagaagcctttgattgatagactaaaataagttttgatacaaaaaggcagttctggccatttaattaaaaagtggtgggggttgcagggagaacatattcggggagctgtagaagtgcccccactggtcagtaggagcatctgaggaagtcttgtcaatctttggctcttatactcatccaacttgcctgcagatcttcctttagtggttctactaaaaacacaacaatacttaattcacctcctgcggccatcgtagccagttctcccacagcattactctgccactggaaacctaatgacaaacggtccaatcacaacacaggagactggattcaaaggcttgagggatatccatgtactgactggaaacctgcacaaacatgttcacaggtgctggaatcttcccctgtctcatgtgctcatttttccctgctgtccatgagaatgttagatactttctggtgcctaggataatgcatcattcagaatgtctcccggactactggcctggcttaaatgaagggagatgacttgtccacagggacacttcctcctcgtttctccttccttcagcatcagcagcctctaatcttccagcacattcatgctgccccagtctcttctgtaagagaaagagaaacacttgctcttatcagttcatttgcactaagacaccagagattcaaatgtataccctatccttccctttccatctccaacaggcagtacttgtatcataaaagagggcaatgcttgacccaaaggaatggtgtgtcatgatggggatggaggagaggtgtggtatttgggaaggggaagccttccaggtgatacattccagtgagaacaaatttggccattcctgaagtagatgtttacatcacctaagcctcacttatgctgggaggatttcagaattatttaattttcagaatcagcagttgaagactgtagagaaatctactagaaatgagttctactgatctaatcttaacccaagggcagatatatgctggtcactctctccacccagcccttctgggtctttctttcagctttgcacagacactcgtgttgagactccactatgtactcaaactgtacagagtgttcttggagctctaacttgcattttctgcccttgaagagccaacaataagaggcaacaaaaagtgtcacaagacagtaaatgattaaagacaaaataacaagtgtgtataataagaagtgccctaggagttgaggggtgagcatggaagacccccgtggactagcatgatgggaaagactttctacatgaaataggataagagtgtgtcttggagatttgaataagtggaaagaggggtgggtaagcatgatagtatccgaatataaccaccctcagtttttcccattccatgtagctcttcccatcaataggaagagtggcggctcacaccgtagtcctaattggaggctgaagtgagctatgatctcactactgcatgccagcctgggccacatggccagatcctgtctgttaaaaaaataaatagtctgggcacaatggcttacacctgtattcccagcactttgggaggccaaggtgggccgatcacttgacgtcaggagtttgagaccagcctggccaatgtggcaaaaccccatctgtactaaaaatacaaaaaattagctgggcatggtggtgcgtgcctgtaattccagttactcaggaggctgaggcaggagcatcgcttgaacccaggaggtgaggttgcagtgagcagagatcacgccactgcactccagcctgggtgatggagtgagactctgtctcaaaaataaataaataagtaaataaaaagaggaggagcctttttcccttccccttgaatctggctgcacattgtggcttgctttgaccagtagaatgagatgggagtaacagtctgggacttctggttgcataggccttaaaaggactagcagcttccactgcctcccgcttggagcccagctgccatgcagaagagaaacccatgctagggtacagaatgattagaggtcatgtggagacaggccctgggaggtgagagagtgtcttggactttccacataaataagcccagctgacctttcttagaaaagtgcccaacaagccctgctagaaattctgaccaatggaattgtgaaaaaaaataaactgttgttgttgtaagtcactaagttttggggtgattcattaagcagcaacagataagtgaaacagtaggataaagaggagtacacacgtgatgagctgctttccacatgagaaggtggcataaataaaatgagaatgagcacatatggtattagggagccctaaattggataaaccaacctggctagagcaagcatttcaggttagcaactagaagaatatagatcaataaatctggcccaaatagctttattgtgggaaggagatctttaaggcagtccatgtgatgccctccataggagatgctgtcagtgttgatagctccttacctgtctacatcagcgtgtaccagctcaatgaccaaccaccagcacctgtgtttcattgcctgggaactttttcttggcccctgaagctcactctgcttatgcaacaggccagaagtgctgaggaaataatgccagcagagtagccctcagccagtgactgatggaattggtctatacatattccagctcaagtatgtgctacatcgtttcccagagctcacagtagaattaaattccaggtgcccacaatggtaacctgctttataatacaccttgatggttgccttcccttctctgtctctcaacttcattcccttactggtgtttccagagatcacctttcggtaatacattgcttgcttttggagaaacccaaactaagatgctttcattttgcagttaagaaaaataaagccaggacggggattactttgaacgggtgctataacaaaatgaaccaaaatttgcagttcttcaaacaaaacagaaatttattatcgccatataagcagtccaggatgggagggcagattctgctcctggaagtcatctcaggacccagccattggggaaccgttgccttcctcagtacatgactctcattagtgtaattcccagccagcaagaaggaacagggaggtgcaagtatgagatgacaattacgcacatcacttctacttgcatgccactggcgaatgtttagtcacatggtcctcgtgtcgctgcaagggaggctgggaaatgtagttcagctggtcagccgtgtgcccagtgagaatagaataaatgatgacgagtggcagacaggagtctccgaccctggaagattagtttgttgccaaagtgcctatagctagttagtggacaagtggaactataagcctttctgcacactatttttttccttactcccctcacttggattccagccagactgcaacagggctcaaatgtcatgctgaagagtctggtattctgcaaggttcatctcccctcatcacagaagcagcaaagcagaataagccgttggaggccctctcaggctcagcctacatgaggttgctagattggactttgtggccaaagcaaatagcataaggccctatgctttcaaacagagccagccagcctcactgctagcccatgtagccccgtggtacagatttttagatgcacctgttactttactgacaaacaccaaaacaatgtcttagaaaccatacaaaccacacaaatcaacaatgatgggaagggcacccctatgtgacactcaacctgtcggattggaatcctagccaggagagggagaggaaagaaccacggggctagctgaaatctatggatatcagagatattttgcagtcatctctgaagaacctgaacttgcttctgtagcttccaattatccacaggccgacaaagctgtttcttttggaactctgtatcacagatggaaatgctagaaggttaagcccacccagcacagctcatttatacattaaaatagaagaaaatgaaaggtgacaggtttatctaagcggatcctattcataacttttacatgctaacctgaatttttcaaattcactttttgactggatttggggttaagttggccaatgtacaaatggtcattaaaaaaagggggcaatgaaagcaaatgaattgtttattggaaaaatttgttaaatggctctgcactgttcttttatgtcaatttaaaaaaaaaatcctttatgctccatagagattgtactaaattttaaaatcgttattctgccttaaccattctttaacttttcccaagatataaggtgtatatttttttacatgtaggttgaaaattaccaaggtttatttcatttaagttattggacacaactcattattatatttctaatatttttgtgcaagtgaacaagagtagcagttacctctgatttgaaccctatacagtaaagtggtactttggatttttccccccaacaatttcctgttatgctcaacaaacctctctccaaatgcaaacctcagtctcagttagtagactgtgttgaaaatatgtgtctaatcaccaaaaaagccaagcatttatcaggataagccttccaaactcatcaactttaatggtatccagacggcttttctggagagggctcattagtttaaaaaaaaattctcaacatttccatgttctgtagctttactgacatagtcaaaaatataatacaagctccctgccttcttgtttagtagccatttcctgcccatatactgccttgaaaaatagtcaaacaaatgtaaagaagataaatatcaagcataaatgaactagcgccaaaggggataggttctgtatataaaaatgagcaacaccagtggctgcagattaagaaactgaatatgttggtgtttaaaattagcatggttccccaaaggattgaaaatgttccatttaagaaaagaaatgttttcaaatcactctgctgactagaggagtctgaatcaaagtcagaaattaataataggatgcagacagagacccccaatcataaatagcagagatcatttttatatgtataaaagcctgcatggcccagcagtgtctatagctctatggggaaaaaaactaatgaaatgcaagaagaaaatgttgaaaatagaaatgaatgtgcccggtagaaatgctattgtcatactcttgtgacacaatgacttcttttctggaaaagtaattcttcaattgagcccaggcaagcattgtattcattgtaaagttgtatatttaaacctgtagtctgaagggcttgcctgtatttaaagctcaatgctacctgggctcattagagtaccaggacaaagctctagcatgttactgctttgacactcctcagaacttctaggtagttttcagtggcttcaagtacttagattgtcagcagtataggaaatagaaagtagaatattgaatgggtgaggtgtatacatcaaacatgtgggaatgtatagacagagagataaagatcctcctcgaacatcctattatattgcagagggtgcagaacaattccagggtaaacacaggcttggagtaaacagagctgcaatgtgcaggttgcacgaattagagcatcccgagtctcattcaagatcaaatggttcctttctaggctttttatcaggaacaggttctgctctgggtaacagaaagataaaagaacataatcgcagccatgaaatctttagtgtagagacaagaagagcaaggggtaagtgtttaaattcaggcctgttttaacaacacagcagcctcattctacaagtgcctcctttccagtttgggccaactcagtgctttggctaaatctgtgaaaggatgtgtgccctctccatggttttggataaacctgtgctttctgggaagttgctttcaggatgcgagtgcactggctgaaggtgaagataggaaggacagtggtcaggaggaggatagccccgagccaggcaggacaatatccagccaaaataatttaccctgctttctggtaaacgcaatttatttttatgtatttatatttgaaataaacaacacctgcgcacgtggggagaaaagtgaaagattcaagaaacagcacagtggaaagttggtctccctgtagcccacctaccttggttcctttcaagtggcaactgtgagccttccttgcagatatttccatgcgcgaattgtcactcaatttcaatccatgatctttaaaaacacagctccctatccccatccagcccctcccagcacccaggtcttctcttccccttcaggtcattcttcacccagccccactccccaacatatttcttcatcttggggtacctgacagacgacctgctgacaccctgatgacccaggcgcccttctttttttatatatataagggttagagttattacttaatgataattacttattttacacgttgtcgtctgctgatgtttaaaagataagaagacatttgtcagggcgggtgcttgaggctctcagaggactccgggagacactgccaaaacgtttccaaactgaatagtcattgggctgccagataattcagaaactatctgtatgagctgtttatcaaattattaaccgcacagatgttgtttggctgaagagcagctgaatcccctctctggcagccgcggagacaaaggtctccaggaataattggagatgtgcatggaatattaaattaatttactgctcttaattcttatgcaaattctgacctccgatggcgcctatcaattaccccgcccgcagtgaaagcgaaagcgacagtttcttctcttcgcttttttttcttttttaagaactcgaaaaaggaaatatttgcaataagcaggcggtagtagcacttcgtagctggaattatttaattgaatcttcaagtttttagggatgcccgtagaggataaaaccccagtgctcagcggagagggtgggaggggtacagggggcggaggaatctgttggtttgactgtacacctgcgggcggcggcaaaatacagccacgagccgggaccagtaatgtcaaataaaacattggcttgtagacggacgcgggccttgggaatcgcgcgagcccagcgttagcccggggtttcaccgaagccggcgattcgaagggagtggcgtttccgcaaactgcatcgctaggggcccggcgtggaagcgcctctgcgcaactttcctccaccgctgcctacaagggaggctctggcttccgtttacttattttttaggagttttaacctttggttcctgcttttacaaccgctaaccccaaaaacattttttttttctttttgttctttgtaaaaccaaaccactatgctgtgcgttcatgttcaactctgttgaaatcccgggtgggccgaaataagatttaattgtctcctgcgtggagaagtgacacccactttttcccctgaattgagcaaacaccagggctttgtctgagcttgtggcttaaacgccgggcggtttctgcacccagttggtgggttgtaagacaggaggtttccaagtctttcatcatgtttctaacaaggaaaaccaaatcgggcccataatgtcatcagccccggcccgacctcgccgggacctcggcagcccgatgatgtcgctagcggccccggcgcagccacgacgcgccgcctttcagctcctcgcagtccccacaaaagccagacaacaatatcaattaatcatgcagcgggcaaacaaggagatttatcccgcgacaaacagccccaccgagagccgctgaatgggcgtgattagcatgtgaaaaggcgagcaaaactccgcggttcaacagctaaagagcaatttgatggggctgggatggggaaattacttgattagcgtccatcggaggagaacacggttacagcccctcggccgggaatccgacaggggaacaaaacgcgctggtaaacgcggcgacgtacagggagcgcgagcgagggagggagcgccggcgagggagggagcgcgggggccgacatcgagaggcaatcggggtgggggcagaaataggggctgacccgctagcccccgccaaaccgcgaccaccctcacctagggctcccgggcggactcaagacttcacccagcgctggaggtcgaccttaatttagagcgctgccccggctctggcccggaaagagagtgacagaggcgcgtgcgggggaaaggcccacccacgctgtccctggagtcccctccagtgtccccagggacgcagtccgcggccgccagctccaggggctcgggccccaggttggagtagccacgctagcggctaggccgttccaccgggtagctccgcccttccttttgctcaggcagctaactttggagccgggcaagacgtgttttcccgctccttcgaatttaaccgcccagtgcctgcctcctggaaaagctgtcacgattgggcttgggcttgggcttggccttggtcaagaaaggtttcctcggctgcgccaccgtggggatggaggtgggagttggaacacagccccctagctgagtgcaggggccagaggctggcgggggcacgcgggggtggttgggggcggagtgcggcgaggggtgagggcgcgaccgccttggggcaggggcggcgatggagtagctccgggctctccacggactcgattggacagccccaggccggctttggatccttggaggcggatacgcaaggccagacctggtggcgtggccagttgggcatcgcggtatcttccccaggcctggagggcagtgctgaaggcccgcggccgaggttttgctttaagtatacttgggcctcgcaactcagctgtttgcgaacagagacctggcgaatcgccgaggagcggcgcggctccgcgtccccacttcaaggccaagtggagagtgaggacacgctgaggccccctgctacctatcatgccatcttaagcgggcaccgactccttacccagaaaagatcctggagctaaagcctgcgcctacaccagagaggggaatttaagtttcccactctcgacgtgtctggaaccttccctctagccgcatacccacaaccccctgctccctggctcctcccagtgtcaaggaaggagaaagactcccaccctgtccccaaagtctcagactaactcgctccaggtcacaggacccactaagagggcctttccagctcatgcccggaacaggggtgcagcggcgaccctctgggatctggagagagagaatttaacacggccttcctgaagtacattcacgcaaatgtgagaaagacttcaacgcacagaatcgccaaagcccttgccgtcttaaataaatcctgccccttggcacagaagaacggagaaccaaggagttaattcctattttataagaaaaaaaaaaaaaaaaaggagggggagagaggaagggagtggatggcccccactgagcggaacaattgtcactcagttgaacagtgtcaattaacaaaccgcagctctggcagacttcaaaaggcttgattctttttgaaatgtctgtggtgatgggtgtgcagcgaaccccagctcgccggtggccgctcaccccgctcgcctctctctccctctggactcggtgctgaagccccagtgcagctcgctcctccttctgtcagcagctggacccggaagccctgactcccggcttggcgcctgtgctgagagcggagaaggacgtcgcgaccggcaggcctggagggcgcattggtgtgcagagtgtagcggctggtctggccctgggaaccccagacccgcgaagctggagggcgcactccccggcctcagagccccaaaccggaggcgctgtccaaacgcgccaacgctgcaagcaatgtggcagggcacaccgaaatgcgtgtctcgcacacctgcccatctttccctgctcaacacgaaagcgccttgtggctctaagcgcttccttggggtggctggggctgtgcattttaattccaaagtcaagaggttgaaccatctcaaagttggcgggtggagggggcggtggcagggaactagatggctggatgcctttgcctgcggggtggcagggctgtccctaccaatagccacggctcggggctggctttgtagttatttttccaagttctgcccggtgcccatcatattgccctgaaaagcaaaagaggccgatgcaatttattccaatgggcggtttttaagaagctggcaatttgaaccggctgggtgttatttagtgcaatatgaaatcaaatgatcctatttctcaaataacagtgtctgtgaggagaagtgaatcctctgaaagggtaattgtctgctgatggtgtttcccattatacccgatcttggcctaaatggtgttcggcagcggggcggagagcgaggggtgaaatcaatgtgcgccaactcgcgctctggagacaggaaaaggtagcaccgctggcgtcctggcacgtcgagcgaacaatgccaccccacgcgtcactgatcgactcatcttgcaggtgtccgaaatcattagacttgagtgatcttgtggacgggggtataagactaactgtttttcctttcgcaactttgggaattgttagtctcctggcatcagtcacgcagcagactgacgataatctgggaaatacaacccagtttggagtcccttatcccaccccctccccacctccatgtcattactgagacgctcagtcctttcttccaaggactcacttctgtctaggaccttcccagtccagcttctggaaaacaaatgtaattcctgggaaatataatgcgtccaccaggcgcacactattaatgctgtaattaggtgtggtacctttgggagaaacaggttagtcctgggcttttaaattgttctccttgggcccagccactatttttggtggcaccagatataagggggtcagtttgtgtctgagagcagcacagatgaggagcaaatttaaggaatgattttcataacaaggacaaaagcggcatgcgggaaccagagcgttggcctttggtcaggtcagtaccccgaggtggagcgtcagcagtaatatcagaggctgcttctccttaaaatgactccggctgcagaggcggccgcaagcaacagccttgtccataaatcctctttagttaccactaactcaccttgaggggagtggcctcctctcagggcctttgggccaggacagagaggtgcggcccctggagaaagatgcaaccaggtctgcagccgctgggggcccaggacgcggggcagcttcggagcacttctcctctgccccccaccctccaacccctgacttactgttttttttcctaagaagggttttgtgtgttccaaatatcctggaattgcagtcacaacctacatcctctgctaatttggggcatttcaggctgagcctcctagaaccaatttgtggcttgtttctgctctagctaggcaggttttgtttacatattctctctgggtgttttgagaggacacacacagacagacacacagacacacaggcgcgtacacacacactcatatattttttctatactgtgacctctgtttacaagcccatttggttgttcatgattttccccttccttggtgttacctccaaatatctggagaagctgggagagaaatggtcatggctgcatatccaaggagcccaacctaggaagcttccatctttgtctaggaggaaggttcggccactgcacctggagcccgaagcaccggacaccaggcgcgccgttctggcgctctgcagggcctctctgggtgaaggaaagcgggcagcctgggttcagcccaccgggtcccctttcgaatgccatttcccagctgaaaatccagccagcacagcctggacgccgagccctctggagccctggtcaggacgctttaattttcaccctcccgctctgggtctgaacaacccccccgtcccccgccccccaccccaaggtgttgtttcctagggtcttctggggacatccctacctgtcgagggcctgccctcctcgggctaaaagttcagcccttcgacagagccatggaataagaggcgactctccctgtgtcccgcaagtggtttctcgaggtacccctctgaggctgcagcccccggagcagacctggctctgcatagcagcaaaagcaaccgcctacctgggccggggcaggactgtgccgcggcggcagggacagtgtgagcgccgccggccccctcacccggcgagggccctgcgctcacacttcttccaggggaaggagtggccacgcctgagcccccctaaacgacctcttcaggagaaaagagtgccggccaggagtccctccagtaacctcagtttagatcgggttttcgcgcctcccctaggaatccggctggaaaccccggagactctgcgcctagagttttgcgggcgtctctctgcctccccgcagcttccggctctcgcaggcttcatccactccctcttcccccggacctgcctgaaccccgccgagcactaggcaaggccgggctctgcgggctggggaaaagaaggggcttggggtggcccaacccgaccgccacctcggcccggcctgcggggaaaccccacaaagtcaaggcgcggggcggggtcggggggatgggatccagagagagactcagaggggcgccccttccccccaggggtctccgaatcctagggactctctaagcccccgtggcagagaaaagaggaatttttaaaaacaaatcttcccttgcctgaggccattttccagccttccacgcgcctttgccggggaaagagtcgatgactcgccctgctcatcggctcagaccagagctaccctgagcccacacctctcctcctctctgcaagacatcccttccgccacccccagtcccgccgtcctcccctctccagacccactgaccttgggaaggcgcagacccaccgctcgccaagcctcgccccgcactgtgcacgggaagagggggctccgcgcgcagcccagtccggttagctggtcggcgtcggcggggctgccgaggtggcgcagagctcccctcccccacgccttataatttaatcacacgcgatattaaattatcaagctgctcattaatcatcacgcgagttattgggactgaacacgccgccgcgtgttttgacagcccagaaccattcgcgggggtcggggtgtgtctgggtttgggggctgggggatgtctagccactctagagaaacactgcgagccccacgcgggctggtggagcctcttgcctggaaaaagatgtggaaacgcgcaggctgggcgtcagagtttggttgagggtctgtcaaaagcccaaacgtaaccctcccaggccactttccttaatatttggattttgatcacgatgattaagacagccggtgatgtgtaatcaacagcatcttaatttgcagtttttcaggagggtgaatttgacctgactctgagcatcttcattgcccagtgtggacggtgtgaagttaatgcggttgaaatacagagggaatcagatcaccgatgtcatttcaaagaataacttttccctgattcaaagggtctctcttgcctttcacatactacaaatgtggagagagagacataaagagttttaaaaattaaattcttaatttggggtattcatttttaaaatgatttacgcgtttcgccctggagtggttagaacctggttttattttctagggttttatttttccttttctctatttcaattaaaggaatctctttaaatgaataaaccaattaaatgaaacttcttatgatttcattccatacaatagaagaaacaaatgatcattaaaagttgtcttagtgttacaaaggagagtaattaattctcagcattcacaccagcaaaacgataaacaagagggaaaacatcccccaactctggaagaggtggtgtagatgtgaatctgcaaaccaacttaaaaatatatatacctagtttgaaattagtctttggaagaaatgtaattcccaaattaagtcttttgccaccttagcataaaccaaggctagtttttagcggaagaccagttcctctgggcaagagctgtgaatttcaataagttggcaagccaagttttctacacaaatcagagattaaatcaagttgttttccctttttaaaatataaagtataaacaaataccaaactggggcatgttccaaatcctctgcagctaaattgcatttaacttttccaccagaaaatgtgatcaatttagtaagccaataagtacataaatactacccccgcttatgttttatcgcagaatatcattgataatattaaatgtgtccaagaccgctcatgagttattttctcttctgttaatctgttgtctgcatttttctactctgtccactaacacacaaagagatgggtatcaaaactcaacacacacacatactgctaggtgaaattcatacatcctaaagaagctagtgcagagggggaaatgccataatatggatgtgatattttttcataagccaacggtgaaaaatatattgactatctttatccaggcagttcatgcctacgtatgctctgcagtgacaaggacatttgttgtcagggactgagagatggctttcaatgccaggagctttttctggtaaaagtgggccattggctaaaaaattgtatctgaagactttgttttaaaactggagattttgaacataacctgaattatccagacaacatggtttggtgaacttggcaatcgtgtacttcaagattacatgagaagcttttgaaaaaaattaaaacataaggttttattgagtagagtcaccaaaaatgggaaaaaataattcctttcactcatttgcctattttcttcattgtactgtttttgcatgatcacccatttgatgctcactgaaatgctaaaagtgtgaattcgagatgagaatttatctccactcctgaggctcaagttatggaacttgttcaccactagagcaaaagcaagaacccacatttcctgactcctagtccagtcctctctccaaataatagctaacacaaacatttaatttgttctttttcataggccctccctatcactaaataagattgaacactttaattctctgaagctttgtcagaatgtagcaaatttggaaagcactcttgactaggggtcagttcagcccttagttatagctctgtgaccttgaacaagtcactctcttattttagttgggttcccctagaagtcagccctgagccaaagatgagtgcaaatatatttttcaggaggtgatctcaggaagcaacacagtaggggaagtagggaaaagaaacagggaaggggagggagcaatacagagtgaattaccaagcaagttaccattttattgcaactggaacttaatactactagagaaaccctgggaggcagtgtagacgcctgcttgagggacaagggaattgtaccatcctattattggttgaggacttctggggtgggcattatttgcccacactgtagagttgccttacaggaggtgaagaagacattggccaaagaaagaccctaggtaaagggtcatagatgctggcagttggagggtgggccgatgtgcatggaaatggtgagtcccattgtgttttccaaaaacagctgtgtctgtatctcccagcccacgtgttcttttgcaattgactgtgccactctcccatcaagaagtgggacttagttttccaccctttgaatctggatgggccctgtgactgttttgaccaatagaacagtgaaaatgacattgtactaattccagtgtgggtgttaactggccaagcagcttccatttcttgtttattggaatgctggctcttgggacactccctcttagaacccagccaccatgctggagacagatcaggtaagcgtgccgttcaacagccctagctaagctcccagctgactgccagcattagccaccaatgtggagtgagcaatgaccatgagaatgagtcatcttggatgtccagcccagtggaggcttcagaagactgcagctctcacatctgacttaaaaacacataagagatcctgtgatggttagtttatgtatcaacttggctaggctatggtacccagtaacttgctgtgaaggtattttatatatgtaggtaacaactaaaatcagttgactttaagtgttagaaattatcctcagtaatgtgaatgggcctcatctgatcagtcgaaggccttaagagcaaaaacggaagtttcctggagaagaaattctgcctcaagactgccgcatcaactcctgcctgcatctccagcctgccagcctgtgctacagatttcagatttgccaatccctacaattacatgatccaattcctttaagtatatatatatggtatatctatatacagggtatatgtatacacacacacacacacacacacacatatacatatatatatatacctatgtctataattggttctttttctctggagaactctggctgaaaaggatccaagccaagaaccacccaggtgagcccagtaaacccacagaaccataaaagtaataaaaagccattgtttatcacacagcaatagataatgagaataatcagaacaggaagtgacattgtccactctgcttctctgtacctcagtttcatcatctctgtagtgaatatcttgtcctagattgacattttagctctttcgaactttcttgctctcaaattcccaagactcatcaatgagatggactattctgctgtcattaaattgacaatgcatattttaacaccaagctgaaaatcaaatgaataaagatttaaatacgataagatggacagattactaaattataaaaattgtggcactgaagaggttataaagttaattaaatagtcggtaggttaaggaaaaagtggttttattcttctttattaagttgcttaaataaccctgaaatatttctgtggttttatgatgagagtttttattggcgcttttgtgaaataatggcaatgaccttggctatgggctttctacagaacaagaggtaacacttctcatcaatgatgtcaccaaaatattctagaaatcaggttgaatatcataatagagaaaaaaacatgaggtccaattattttcctactcttggaatgcccaggtgcattttctgagacttgaggggtcatgggaatctttgtatttcttttccttgcccatagccgataactcttttctttctgttttttttttattgcccaaagataatgatgtcacaatttcaacatgtttattagaaatttatttctatagagaaattcagctctgaaatattcaaggaaacttaaaacagggaaaagaatgttggagaaggaatcccatggagtgttagagtgtgaagtggtagaaaattccaacttattgctatcttcgttgctgtacacaccttgcaatatccagttggcctgaggctctcacttcatttcatattgtcacttctagaccacaatttcattccctctatttttttttgtttgttctgtttttaagagacagggtctcactatgttggccaggctgaagtgcaggggctgttcacaggcactatcatagcacactgcagcactgaactcctgggctctgcaattctcccaggtagctgagactataggcacaggccactgcacctggcccctctaccttctatttaaaattcatcccactgacttcaggttctgcttggggataaaagagagctggaaagagcattgctctcatcttacagcaacaaaggccagaaagccagtaagtatgtctgttgttgaaggcaccagagtactaatatcacaaggtaaccaactggcccaagacttaggctcagggtgagacttcctgtgcatgcccgaagccctccatctgacagcttctgagtgtatccaccgagttcttcagtgcaaatctggagcatggagaggaagttgaacagttcccctttaagcaaggtagtatattctagtagtcctataatagggcttgaaatcagtcttagtcctccaacattctttccacaattcttctttatagagttgttttggctgttagaaacagcttgtcaatttctttaaaaaaaaaaaacctgctgggattttgatagggaatttgtagaatttatcaatcaatttggagagaattgacgtcataacaatattgagtgtcctcactcatatttctctccattgatttagatcttctttcatttctcttagcaatatttgcagttttcagtgtgcagttctgtcacattttttgtcagatttgtccctaaatatttcatggttttcgatgctattgtaaatggtatttaaaatttttcagtttcctattgtttgttgctggtatatagaaatacaattgagttttatatattgatcttttatcctacaaccttgctaaactcacttattagttctctgcaaggcagtagaaaccagaatgacacagcctggtttccctcctccccattatcctaagaggacatttgtcatgcagatgaccataggttgccctctacttctctgtcttctgccaggctttgaacaggagaagcaacctctccaagcctcaggataataatgctcaccttgccgtgctatagttaggagtaataagaacctacatgttgaaagcccagccaaggcctgaatcatagcactcagtatatgtcagtgtcctttgattaatattctaagttctccatggaaacttcttttgtgctcccaagtgctaaataccctttaggtccaagtgttcaaagcatcctcacttgttggcctatcatgatatgctccattaaggaactaaaaactatgtttttagttaatgcacatgctgtttctaaatagctgatgctgttagagttcatttctcctttcttaccctgcaggttacatagtgtctgtacagtccaggacatcctccacctctctgtttgagggtgttctctggtgctgggacttcttgggagattgcaagcaagactggaaatactagagttgtcttagttcaagttgctgtaacaaaatatgttagactgggtaacttataaacaacaggaaagtagagtgctcgcaattctggaggctgggaagttcaagattgacgtaccagcagactgggtgtctggcaaggactcactacttcactgatggcatcttcttgctacatcctcacatggtggaaaggcaaaaggggcaaacagcctccctcaggcctcttttacaagagcactaatcccattcatgagggctctgcctcccaaaagcaccacttcttaatatcaaaacactggggaccaggtgtggtagctcacatctgtaatcgcagcactttgggaggctgaggcgggtggatcacttgaggtcaggagttcaagactagcctggccaacatggtgaaactccgtctctactaaaaatagagaaattagctgggtgtggtggtgcatgcctgtaatcccagctattcgagaggctgaggcaggagattcacttgaacccgggaggcagaggttgcagtgagctgagatcacatcactgcactccagcctgggcaacagagcaagactccgtctcaaaaaaaaaaaaaaaacaaaaaacaaaaaacactgggtattcaatttcaacatatgaattttggagtattgcaaacattcagaccatagcaggagttaatctaaggagcaaccctccatcaatgagtggtgggagtggatagattcaaaagcctactttctcatccctcagtcaagatgattctgttctatccttccatagtcccttagaggtccccagctgaattgagtcacagctgtcctcagtggtaacctgctcattaaggcctcttaaatctgcttccttcctttctctgtctaatggtccctgtctctcaaccactttctgggataacctccaaaataaactagttgtgccctccaaccttgtcgtgggatctgctttggggaatcaaaaataagataggtcatttgacaaatgatcaaggtagttagtagcagaactagaattagaacccaggtcttctggttctagactatgttctttagttttaccagatgtgggagtaatgcacttgaaacaatgataacacagcatccagcagtgtgtaattggacactaatagcccagcactggctcctcatgccatgcttgtatcctaaggctggtattaggaattactcttctgagtgggttcaagtagcaacataatcagcaaatgaagtggcgactgaggtgcgggtcactgaagccaagaagggataattttttaaagataatgaaatagtagtgatatgggatattttaaaatctcatggggggaagggagcctacagtagtggtgcacagctctaagtatgacttaatgatgcaagtttttaaaagcccagaggtactggtcagcagcatttactagaccacgtgtttccataagcaaggcacatgtacacatttgacaaatgacttattagtagtgctatagtgtggcgctgctgtgatgtactagaaagatgcctaccccatgacattttatgtcaattttaaaagttaaatacaagttactatattaaatgccatcactgtcaatatcatagtatatgaaatgaaaacagtctcatcaaaacaggactagataaattgcatcatgtaagatccacaaaacaaaactctacataactgtttaaaaggatgaggcagatctatagctttccatatcctgatacagtaggatcgccaagatatgttcagcaaaaacacaagatgcagaacggtgtgtaaagagtgctgctatttacatattttaaatgctataggagctgggttcagaaatgtagaggtgctcagatagacaaagatgtgcttagaataactcaggaaggccaagtaagatactggtaactcattgcctccggaaaaggaaactggaaggcttgtggcaggaaggagagggacattttttgctgtctttttcacagttgaatttcctatgatgtattgtttcaaaaatattataataatgaaaaaatatttgagagctgtcctggaagccagccaccagagaaagaaacaagaccactgactgacacgggataatgtggaaagaaaggcccagccaacatctataccaaggctgcagtacaagagtgaagccatcctggacattgcagcctcagcaaagttcctggttgaatgtgcttaatatgtgaaccgttctctttaccatcttttttctcctcccgtggagccgccaccatgaaagtcgagctgtgcagtttcagcggatacaagatctactccggacacaggaggcgctacgccaggaccgaagggaaggttttccggtttcttaattcaaaatgcgagtaggcattcctttccaagagtaatcttcggcagataagctggactgtcctctacagaacgaagcacaaaaagggacagtcagaagaaattcagaagaaaagaacccgtcgagcagtcaaattccagagggccattactggtgcatctcttgctgatataatggccaagagggatcagaaacctgaagttagaaaggctcaaagagaacaagctatcagggctgctaaggaagcaaaaaaaggctaagcaagcatctaaaaagactgcaatggctgctgctaaggcacctacaaaggcagcacctaagcaaaagactgtgaaggttgtgaaagtttcagctccccaagttggtggaaaacgctaagctggcagattctatttttaaatagattggatttaaaaaaaaatgtgaaccaggccatccaaatgagctcagtcggcccacagattcatgtgatataataagtcattttggtttaaagacactaacacctacatgcacccatgaagaaagaaaggaaagaaaaataggagagaaaaagagaagaaaaaattgaatacaaaatcgtgacttttccaaagtagaattctaacgttaagtatgagacatattttgggtgacccttgttgctgctaagtggtagcaggtagttaactgtgtacacaccaccatccctgagtggtggtctcctatgatagggacccaatgatacagtagaaaacccacagatcttggagaaaggctggactagatttaaatagtcagcaagttccttaaccccccgagcctcaatgaaacagggataataacacacattttgcagagctcttgtgaggcttgaagaagtagactcccacacatgattctatggctgaaagagagtgggtatacaataatcatcgactttttgaaccaccaccatcccaccccaactgtatcagttacctaatgctgcctaccaaatcatacccaagcttaatgacttaaaagaatatgataatttgttatctcatggtttctagggtcagaattcaagagcagcttggctgttcagttctctcttgagatcccttgtgatgatgcagtcagattttgcctagagctgtagtcctctgaaaattagacagagctggagggtttaactccagctaagtctaattgccgacttatcagcactcacatggctggtacaacatcacacaggttggccctgatacagtgcaggaggggactacacaagggcatgaattccaggggaaggaatattggaggactattatgggctgagtcgtatcccctcaaaattcatgttgaagtcctaactcccagtacctcggaatgtgactatgtttggagataggctctctacagtggtaattaagattgtattagccattcttacattgctacaaagaaatacctatggctgggtaattttaaggaaaagaggtttaactggcttatggttctgtaggctgtacaggaagcatgagcatatgctcaacttctcgggaggcctcaggaaacttacaatcacatgggaggcaaagagggagcaggatggcatgtggccagaatgggaacaagagagagggtagggaggtgccatatacttttaaacaaccacattttgtgagaactcattcctgttgtgaagacagcacccagccccaagccataagggatctgcccctgtgatccaatcatctcccagcagactccacctccaatattggggattacatcttaacatgagatttggggggtgagggcacagatccaaatcatgtcaaaggctaaatgaggtcatcggggtgagccctaacccaatatgacctgtgttcttataagaggagattgggacacagacacagagggacatcatgtagacacagggagaagacgaccatctataagcaaaagagagaggcctcagaagaaatcaaccctgctgacaccttgattgcagacttctaccttccagaactgtgagaaaatttatttctgtggtttacacctttcaatttgtggtactttattatggtagccctacaaactaatacaggggccatgatggaagctggcttctatattgaccaccttattgcattaaaaataatggcttcttcagatacaaagccacttattgtacaattctatttatatgaaatttcctggatagataaacccacatagaaagtaggttagtggtagccagggactgggggtacagaggaatggggaatgactgctaagaggtatagggtttctttttggggcaatgaaatgttctagaattaatagtgttgatggttgtacaactttgtgaatatgctaaaaatcactaaattttactctttcaaaggatggatttcatcaaatgtgaactatatctcaatttttaaaaacatcttgttggcttcttattgctacacccgaccatcatccagtatctttggggtggtcttctggcctgggttctggtcccagaactcagctgaggaatgctgaagaaatatatggcagcctttattcctgaagatggcctataatcaagttgcggtcatagaacatggcattaaaatacttgcaaaaagattccagtttaaattcattcccaaaaagtccaccactgggaagaagcaatgcccgcataacacctccacaggcccaccccagcttccactcctgcagcagtggcccaccttggatatgacacagcctcttgtgcctcagtttcactgctccaacaaacacctgccattgtgagaagtagcagaacatagtggttgagaattaggtctctggtactacattttatgggttataactccacccctcctctgacgagccatgtggctttggtggagtggcttaacctcaacatgctccaaattcctcatctggaaaacggggccaatacatgtgaagagccaggcacaaagtgaagctccatcatattagctatcggatactatttactgacacacatgcatgtgaccacacacgtacaatctctaacaaaatgaacccatttccattcctctttggttacatttagaagtcctaggaaattcagaatgcttccttgtcctcagggagagttggaaccatttgtttattgagtgttttctacgggccaggcctgtgctaaggacgtcttaaatatttatttcatttactccttgcaattacttgataaataaaaatgttattgccctcattttagaaatgaggaaaatgagacattcaaaatgttgagatgtgctcagagccacacagtcactaagaggcggagctgggactggaactcaagtctactgattctgaagcacatgatctttagacaacatggtgctgcctgcgtgtcattgacttctacccctgaggctgatgggctgagatctcctcaactgccagggttgacacaaaaggagtaaaacggaatcccaggttgaggttcccaacttaatgtcacctactgagtcatcagtgatgaattcaggtgaccagaacctgaccctgcgtgggcaggtgactgcagaaccagtagaattgatgaaaaggacagagaggaagctcaggaaatgcctctgagagacagagataagtcataaaatgcagaatttgggccattacctctgacgacttgcttcacctcccaaagggatatttttcttgtcttcctaagaagcaatgctagcttgtgttggttgagggataattctaccaggcatgattccaagtgcatcacacagatcaccacatttaaggctctcaatgaccctgagaggaaggcactcttacgatcaccatttcacagatgaggaattggaggcacatcaagggtaagtaatctgcccagggtcacacaggttgtaagagaagtgatagtatactatgcagaggaggcacctgagcccaaattcccaactcttgtatctgactgcttcttgaggacacaatggcaaatgtttgatgattaagtgaagggaggttattttgtgtagcagtcatcattgaggtgtgccccagcaatgaatgaagccaacatttttacaaagactgtgaataattgcaggcaatgagaagtggaacattctacatgaggtgccctgtcaccttgtaaacataaatacatagtcatcaaataaatggtacttattatgcaaaccctttggttttaacctgcctgcgaattgtaagaacagtcctagagcgtccctttgtttccaacccttgtagttaggagtacttgttgaaccctgatgagaagtgcatccaagtggcaaacaattaagaaattcaccaaatgatttttgaggagaatcttggcattcaaagattgttcacatgtgacatcagcacagcctgtcactcatgcacccagggctgcagggctgcagagctgctcctgcctggtacaccacgccacaggccagtcctgcagggagaaaagagtgcaaagatttggtgtttcaagtctctctcctctgaggattcctctttgtctacaaagggataatcctggagacctcatggaagcccaattcaaggacttcagtggaaatcataggcatataagagctgtgagacagagtgagcccatctcgtttaagtagtgagtctctagctagaggcagttaactactctattattccattttttggctgttatttagcttttctagaactcaagtattttagagactcactttttttttttttttttttttttttttttagacagggtcttactctgtcactcaggctggagtgcagtggcgtcatctcagcatgaaacttcacctcctgggttcaagcgattctcttgcctcagcctcctgagtagctgggcttacaggcatgtgccaccacgcccagttcattttttgtatttttcgtacagacagcgtttcaccatgttgtccaggctggtcttaaatcctgagctcaggtaatcctccagcctccacctcccaaagtgctaggattacaggggtgagccaccgcgcccagccaggacccacatattaatggttggtttatatgatatgaaataaaatgaggaaatctatgtttttattttatttattggaatctgcacccaattcttattattttaaattagctattacaaatgtctttgttagccaggcatggtggcatgtgcctgttgtcccagctacttgggagactgaggcaggaggatcacttgagcccaggaattcaaggctgcagtgagccatgatcatgccactgcactccagcctggtgacagactgagactttgtcttaaaatcaaattaatttaatttaaaaaacaaatgcctttgagcaaagtgctgttagtaacctcatgtcttcctgtattcatcagggttcttcagagaaacagaaccagtaggacacacacacacgcacacacacacacgtgtgtgtatatatatgtgtgtatgtatatatatatatatatttatatatatatatatttatatatatatatttatatatatatatttatatatatatatatttatatatatatatttatatatatatatttatatatatatatatttatatatatatatatttatatatatatatttatatatatatatatttatatatatatatttatatatatatatatttatatggagagagagagatttatttttaggaagtggttcatgagattgtgagggacttcattcttttctcctaaggccttcaactgactggatgaggcccatccacattttggagagcagtctactttcctcaaagcctactgcttcaaatattaacaacatctaaaaaaaaagtcttcacagtcatgtctagactggtgtttgataaagcaactgaccaccatggcctagccaagttgacacataaaataaattcacaatcacacctctcctcttgatgaccatcacctctatattagtccatttcacactgttataaagatactacctgagactgggtaatttataaacaaaagatgtttaattgctgcatggctggggaagcctcaggaaacttgcaatcatagcggaaggggaagcaaggcatgtcttacatggcagcaggcgagagagagagacagagagagagagacagagagagagcaagctctcagtggaaactggcagacacttaccaaacaaccaggtctcataagaacttcctcactaccacaagaacagcaattacctcccaccaggtcctttcctcgacacaggggtattacaattcaagatttgggtggggacacagaacaaaaccatatcaacctcccagcaaggatggcatcttaccttctattcttatctttccacttcccagtgatttatgtcctccctctccctgttccatgtttatccatctttctacttcatctttagatctgcatggttcaacaaagtggctactagctacatgtagcctcttaaattttaattttaattattaaaataaaattaaatttggctgggcccagtggctcacacctgtaatcccaggactttgggaggctgaggagggtggatcacctaaggtcaggagttcgagaccagcctggtcaacatggcaaaaccctgtctctactaaaaatacaaaaattagccaggtgtggtagtgtgtgcctgtaatcccagttgttagagggtgctgaggcaggagaattgcttgaacccaggaggcagaggttgcagtgagctgagattgcacaactgcactccagccttggcaacagagtgagactccatctcaaaataaataaataaataaaaattaaattaaaaattcaatttctcagttgcactagccatattcaattgcccaatagccatggctaatggctaccagattggatatgtctgcataatgactgcaaaatgaaatcttgtcctactttcatatctatcatggattgaaatgtgtcccctgcacaatacatatgttgacgttctaactctcagtacctcaaaatgcagtcttctttggaaacagggtcaatgcagatgtaattagttaagatgagatcatactggggaagggtgggcgtctaatccaatatgattggtgccttcataaaaaggcagaatttggagacacatacacaggtagaacaccatgtgaacatgaaagcagaggtcaagatgatgtgtctagaagccaaggaacaccaaagatagcctgcaaaccaccagcagccaggagagaggcatgcggcagattcttccccacagccctcagaaagaacgagccatgcagatatcttgatcttcaatttctagcctccagacctgaaacacaataaatcatgttgtttaagacacctagtttgtggagctttcttacagcagccctagcaaattaatataatatccaagcagttattgactaaatatacatgatttaattaaaagcagcatagtgtgtacattttaaaatataaaatgctactgcaggccagacacagtggctcacgcctgtaattccagcactttgggaggccaaggcaggtggatcacctgaggttgggagttcgagaccagcctgaccaacatggagaaaccctgtctctactaaaaatacaaaattagccaggcgtggtggcatatgcctgtaatcccagctactcaggaggctgaggcagtagaatcgcttgaaccagggaggcagtggttgcggtgagctgagatcatgctattgcactccagcctgggcaacaagagtgaaattccgtctcaaaaaaaaaaaaaatttctgctgcattgagaggccgagatgaatcagaacaggacttgttgggtttcccactcaattagtgttagatcatgtcccctttgtccaatcacgcttctacacgactgtcgatcatgcctatccaataaagtccccataaaagacccaaggggacagggttcaggaagcttctgagctggctgaacatgtggaggaggttcctggagggtggtgtgcccgtggagggcatggaacctctacaccccttcccccagacctcaccttatgaatcttttcatctgtatcttttgtgatattcttataataaactggtaaatgtaatgtatatatacatatatatggaaatatgttgaaattagaatttcccaatattagaatatatgtacaattctaatttcaatatattttccagaatcaattttgtttttgagctacaaaaacaacaatttcatttggttcacccaaagattcatgtgacttctgggccgagacactggcttcccttgctgtttgcttaatgggaccactagggatccatattttgaactagactcgttaatattacatagatttccagctaggtgactttggccaagccccttatctgccctgaaccctttttcccctgtaaaacaagggggtggggctagactccctctaagttctagctaagacattctaggacttagaggaagccttgatctaggcagacttgatgacccttggtccagtgagctaaaagcagggctgcttacagaaatcagctcagctaaataaagagtttgaagaaaaatattaaaatagagggctctggcaaattaaatattcaaagtgaagaactcagaatttattgaaagcctgtcaccatttaaaatgcataattttagcataaatactctagaaatattccttttgtttgctatgtgttattgttaataaaggagatcctacatctagatttgtcatacgtcattaatgaatcaaccataggatgtaaattataattattttgaattatctatttactgtttaattacatttaattttagattctcctaaaatggcctaataaaaattttgggtgctaaatgactgcctcatctgcttactctgtgctacttgctaaaattagttatattaattgtttggggattctttttcttaaaaaaaaaaactaaccctgggggcatggtcctaaataaaatatcctaaaaatttaatgcttttcttttctttgccagggttgtagtaaaatgttagttacactaaactcattaaaataaacctttgcacattaccactgaatcaattggatataatctgaataaaaactaaataaaagtcacatcagtgctacccttggaccagggcaagaaggcctctgccctggcttctgtgtattagaggttctgttctagcccttctctgcccatgctgctccacgcaaggcaaggaggtcccagggccagatgacaggcccacctggggtgctcacacacatacacacacatgctcttctagaacacgttctaagtacccaacacccttaccttccctgctcaaaggggcccaagctgctttctaaggctttaaaaggcctcttggctgggtctttcctgcaagggtgaccatcactggcatgctcactgcccggccaagaggaggctgaggtggggatgtaggcagagttgggacttgctggctggagaagaggaggagaagaggcagggcacacacatccctgctagtgtatgagaccccctcacaaagcaagactgagcctggggtgggaaatggagttggggggagctggagaagcaggcaaactaaattccaccctggttgtccaggttcttaagaaggcatattggtcaaagtggagaggagaacacgtattttacctaagtttgttatcttgaattataattcaatatttaggcggatggtatgagggcctccattcacactcttgccctggaactggcaaatgtgaatggaaggctgagtaaaatcatagttttgtgttgttggcctttgagtgttccatctctcttacaattttagtttgtcacaccttgcaccttgtatgtgtaagtaaaattaatggcataggaaagaaaccaaaagaagtgaacaataagagactaaagaaactctacaggccgggcatggtggctcatgcaagtaatcctaacactttgggaggccaaggtgggtggatcacctgaggttgggagttcaagaccagcctggccaacatggtgaaaccccgtctctccttaaaatataaaaaataccaaaaaaaacaaaaattatctgggtgtggtagcgcacacctgtaatcccagttattcaggaggctgaggcacgagaatcttttgaacccgggaggcagagcttgcagtgagccgagatcacgccactgcactccagcctgggcaacagagtgagactctgtctcaaaaaaaaaaaaaaaaaaaaggaaaggaaggcagagaagcaggctaaggcttaatttttctgcccagtgggttttgaaatatggttggcttccttcaggaagctttttcccgacgttggtgatgataataaaacctgatgctttctatgtgctgggcccacttataaacactaacacatattaacaatcgaatcctaaactaatcctgtgttaacagcctcccactttacatatgaggaaacctggggtgacttgcacacggcttggcagctgggacgtggatagggaatgtacacccaggcagtctggctcccgggctcctgctagaggatcctacaggacattaggagcattgtcccttagagctgtctgcacaaacgtctgcttcccaagcaactagttatcaacttttccctctcgccaacgatactggcacctggaacaatccttagattcagcacggattttcgagtaaggggttggtccactgtcggggctgagcacggctgtttagcatttgagggtttgtctttttttacttggtgttttgtgtcgcttttgagtgctgatataatagaacaagcttagtacagtgcctggcactcaacaaatcctggcaagaaaggagatcgaggaaaagaagcaagcgagagacgaaagaaagggagggaatgcgccttgtaacattaacgtagcttgtgcgaatcctggaaggtgaggggaaaggagacaccgcgtcaagggagagaggagagggcaccgagcgcccgcccctccgacgtggtccgccccggcctcacgacgccccgcctctgccacgcctcttccccgccccatgcaggtcttcgtcccgccccccacaaagccggcttccgccccgtccctcagcggcgccccgcccccacggcgtcttgccccgcctcctgcaggcggcccggcgcggtgtttacccgcggtgcatggtggggcggtctccttcggcaaccccggccgaacggccacccagaggctgtgctgagctggcgcagcggcagcagcatgagccggaccctcgcatcggccgtgcccctgtcgagtcccgactactacgagaggctgggccaactccagcacgggctgcgggacaggtaagggcactggggcgggggtggggagtcggcccgcgccgggggtcttccgcgtgccctgccccattttccttcccgctcccccgtccgaggttccccggggcccaggcccgcgcgcaacgccccccaggctcccagtggggcctggaggacagtgtttactagagccaccccctgtattgggggtgggagcggagagaggtgagagaccgcccccgccccgtcaatagcagctaaagcctggtctacggtttgaggatgcggccgcgtcacagaatttgcccagaagtgaaggtgggagttcttctgcctgtcactctccatcaagccttgtgagtttctcttgtccccttttacacgccccctccccactctcttcaaattgccatcccgccgtgacagctgcactgcatcaatgatgacaagtcctggaacgcagacggttgtgtgtgtgtgtgtcaaacatgtgcccccgtttaaactcaggagacttttaggggtagcgagggctggctagatttccagcgaagggatgaaatttccagctagagaagtccagcttccagagggttcatgatgcctttgattaagatatgaaagatgggaaccactgaaaacagctagatctaagagtgcatatagagagaaaattataccgcaatgtactatgaataaccacgtaaaagataaattgctggacctcttatttagctgctaagttaattggagttgtaactctcattagttgacaagaaaggaaatacatttttggatctcttgataaacaaaacatttaatgagtgttaaaagttacaaaatcattctagtgaacaggagagctgtgtgcgtgacagtgctaaaatgataacaataattacatggaaaataaaggcagaagtgagcgattttgaaaaggaattacatttatcttacgctagatttaattcttgtcagatatttatagagcatctacaacaggcttccttaattgtcgttagcattttttttaccttgtactccttttctacgtcctattttctttctgacatgtcaccgctcacccatatcagtgacctcttaatttctgactttaaaaagaaatctcttcctgtagagccttccctgtttcaacccattccctaacttttgtgactcttggcattcttacagcactcataaatggcattctttttgaactattaattgtaagttatttttgtttcctgtgctaggaacacctggctgtttatagtccttatggcacaataactgtataataattatgtactttatgattaacacttatttaattattaaacaaggtgaggctgttgaaaatatataaggaatgtgaatcaaattttatagcctgttcacggttctgcatttcgagatttgttttatttttaagtcagtacaaatctgttgctgtgtgtgttcatttttcattttaagaatttataactaactcaaattaatgcacactggacacagttatagaggcaaataattctagatacagaaaaggctgcagtagaaatatcaaaacctggattctagtccacgaacaattgtgtgaccttgagcaggttgttccacctctctgaaccttggttctttaccaggaatgagggggcttgactaatatgcaaagtaaggccacagatttttttctttctctctttgctagaataatgggccttaaagtaaaaaaagaaaaaaaagctgaaagctgtagttttgcaaagcaatgtgtaaagaatattattgtctgtatccaatttgagtgtttggatgtacctttttgtttgtttgtttatttgtttgaaacatagtctcactctgtcacccaggctggagtgcaatggcatgatctcagctcactgcaacccccacctcccaggttcaagcgattgtcctgcctcagcctccctagtagctgggattacaggcgcccaccaccaaccccagctaatttttgtatttttagtggagatggggtttcaccatgttggccaggctgatctcgaacccctgacctcaggtgatctgcctgcctctgccttccaaagtgttgggattacaggtgtgagccactgcacccggccttggttgtacctttttaaacaaagaaacacaaagcatcccactgatcacagataccactgtctcctaaaattcctgagtcatttcatagggagcaaccctgggtagtcacagctgctttatcaatccagaaacttctgggaagtgggagacaaaaaaaaactccctctttctcagcccttttagaggtggtcattgcaatgttagctggtcaaataaccagcatatttccagcccaagtcatgttagctgtagttacacgtagatgtaattttatcgtctgaatgttttcctatgtgtgtacagtgttttttctgcattgtggtgaaagtcaataattgaatctaaaagagtctaatggagtgacttgttacagtgtgtatagcacccacaagcatggtagaaacttataagtggaattggctcttacggttatacaaaaacatccttttaaaagggcccattagccagccgcggttttttcagtgcctatattgattcagagtaagatatcataatagtctagaaactgacactgagatattagtagagtaagctgaagatggtatagaattgtggtatcgagacaaaaacagaataacaagtggcttaaaagtagaaaactcagcaagataaggaccacttagctgtgtaaaactgaaaggtccaagtgaggggtgactgaaaacatgaactatgggtaagcatcccagggatgggtatttcaaagattctgaatagagatttaatatgtaagaattgcaagccatggaaaggcttttcattgaggcaaatatctggtttttagtattaaattttaaaaagacatggagggctcagcattctgaggtgctgcagtgtggatgaggggctagaaaataggcctgtgaagaagagttaacaagattaccaccgttttgcctgggagagaaagccaagaggagtttgattatcagggtatgaagtgttatgatagagaagtgtgagcagcagatgtctgcatctgctgaagatgttttacaaataaattttacattcattactaagaagaacttgctgcttgggaggtggtggatttccaaagtgactgtggtcctttttcactagaagtcataggtgaattttagaaattattttaaagtggctgggcgtggtggctcacacctataatcccggcactttgagaggcagaggcgggtggatcacctgaggtgaggagtttgagaccagcctggccaacatggcaaaaccccgtctctactaaaaatacaaaaattaattgggtgtggtggcgcatgcctgtaatcctagctacttgggaaactgaaacagaatcccttaaacccaggagggagaggttgcagtgagctgagattgtgccattgtactccagcttgggcaacagagtgagactccatctcaaaaaaaaaaaatgtgtgtatatatatatatattttttaaagtaaattctagcttacaaaaaagttgcgaatataggacaaagacctccagtgttcctgtcacccagatccctcaactattaacattttattagatttttgacactgagatatcagttgggtatctatttaaatctgtctatctaaaaccattagccttttctgatctgtttgagaagtgcatatatgatgcctcatcactcctaaaatcttcaatgtgtgtttccaaaagccaaggatgttcttgtacatgatcacaccatacagccctcctagtggtgaaaccagtccgcagactgcatcagatttcaccagctatcttaacgatgctcccttttttttccccctggtccagtggctcacctgcaaaccgcggttgcatttggctggcatgtctcttcagtctccctacatctggaacgattcctcagtctttccctgtctttcatgttcctgacaagttcatagagtacagctttcattctagagggtgaccctcaagctgagtctatctgatggtgtctcattaccagactgcagtcgtgctttcttaggaatacaacagaaatgaagcactacctcagggcatggggtcatagatgtattcagaggtcttcctttctttgtaatttaatgacaagttgctcacactatccagtcattcattctgcatgaaccaagtacccaattgatcatgaaactctagggggggaatggtaactaataaaaatttctaatgtggaagcaattatgctatgtttccttcacttctattctaagttcactcttactagtgagaaggtaaagatttgtgatgctattagttaaaaatgtgtgtttttgtaatttttttccttttaatcttttttttttctttttaacataggcatactgcaacccatgggttgtgttccccaagtgaagattctgtgtctggattttggaccccatattcccattaaatgaattttggttaaatagtagtttccatttaacattatgcaaaggaaagaaagttatgtaacctgtaatgtagctaacagtgacttttgggatgatcttttttttaaaggaaaagaactattctgaagatatatagaaactgataattaagagctcacaaatggagcatggggccagcccctttccctcaggaagccaacctgagatcacctctgttggagtccttatctttatttcacagccttttgtttaggattctttgcttggatagaatattatgtggtttcttttttggcctttacttaatgttaacttagatgagcaatttagcttcaattaggtgggattgaaacaaatagtggtgctcagatggaaccctctgtggctaatcctcccaggcactcttcttgggactgaatggcttcatcagttttatcccccagccccctggttttggctgcctctgcttcctctgctgcccagttccccctcgtccttgcccaggctggttgtggggtaagacaggttttctccttagcttactgctagcactcacctgaacagcacaggttcagtctttactggtagtagctccaggaaaacagcaacctgtgacaaataatgacaccattacagagttataaaaagaaatccctccaaatttgaaatgatggtcttagaaggcctggtcttcatcagatgtaagtgaggccaggtttacttttcagaggtctttctctatctcatccacttggctgtgcccaggcttgtctggttgaaaacagagcaagccaccagtcttcaatctgtacacaagatctgatgggaccccatcaccgaaatgccagcgactcagagaagtctggccacgttacattttatatacttatcttgtttattattgtctgtccttctccctagaatgtcaactctttgagggcaggagtcttggctggctagttcgccatattagtctccaggcctagaacagtgcctgggtcatcataggcactcaggaaatacttgctaaatgaaggcacctgcttctcagacttttcctattgcatttccccatttactttgtggattttattcttttgtctcctattggtgttcgttttgttttttagatttccctggcgactgctgcatacttttgtgccttttgttttagatgcgtctggcattttctgcttcttagaccagagaagcattttcacaaaggtgtgatttggtatttgggctttttttgacctctaatcaacaccttgcaacaaagccattatttcaaagaagagcatggtctaaatccaactccctgttacttatcatgtaattacttataaaatgttttttattatagtgaaaagaagagattggacctggaaaagaaactttatgaatataatcagtctgatacatgcaggtaagagacgacagtgggaacagttttcaagccaggttccatatattaatcaaaaatgtaaccctaatgttatgtcataaatattgtagttagagtactgggtttttggttttgttttgtttagtttttttgagatggagtcttgctctttcgctcaggctggagtgcagtggtgtgatcttggctcattgtaacctctgcctcccaggttcaagcaattctcctgccttagcctcacaagtagctgggatacctgagattacaggtatgtgccaccatgctggctaatttttctatttttagtagagactgggtttcaccatgctggccaggctggtctcgaactcctgacctcaagtgatccccacgcttctgtctcccaaaatgctgggattacagcagtgagccactgtgcccagcctagttggagtactcttaccattctcttatttttagtgtgtaataatttgaaataaacagtgcagtttaatataattactatcaaatttggttaaaatcggtatgagatcaaaatatgttattttcattatttcatatttgttttatttcaagaatctgttttgcttaaaaatcttaaaataagacatagccttatctttttggttgcaatttaaacacattgagcttgtgtgatgattaagacataattactgtagttgatctttcaaggtactactgtaggcaggattacctggtatctcatttgttcatggatatatgagaatgactattaaaattataagcagtgaataatatattgtacgcattatcctttttaggtttcttcctccactattaagagcagatcttaaatattttaatttctattttataaaaactgaactttatccttaagccaaaagtatggcattacctcttatattattcatatgaagaacttctggctttgatagcattaagtttgtaatttatccatgtcacactatgagtgagaaatgaaaagatctcatccagaagagagagaggccaagaatcctttaaagtcaaattacctattaggtcagttctttcccttgtcttcaaaattattctttggttttaagatttagtgtacttccaaagcttccagttgaggtagacagccgtatgactctagtaactctgaaagagacaagaaatcagttgttttgtgtgtggaagaaatagccagcattgtggatgctgtggcctcaagagtgggcccaagtctgaggggatccttggcagctgccatttttctagcccatggctaaagggcagaagattgtgtgtagacgtttcatgcagtctgttcttgggaaggctcctggccttctggtggtgggaggggcaagtgtgagaaaaggatgggcacttttaccaagccgtcagttcactgagctgctgcttctctcccagcctcttactgtttcctggaagacagaggatatgatttgctaaaaataggcttgcttagattgcctgtagaagaaaatccaaacaaggctgcctccacctagtacctgccagaaggcagagtctgagacgagggtctgtgtataagtggtaatttatttgacaaggtggtcacctaaaattggagagcagggctgggctgaccgaaataagagctgttcactgcagtgagcacctggggctcagtccctccagaccttcagaggagccttcagaggagcagtgtagactacccttctgctccgcacagtgtctaatcctgcgaaaggagatggggctgtattcctaccggtttctgacccccactggtaagggcagccccaggtggagttaactcctttacacatctaggcttttccatgctgcaaactcagaacggcagccctgaaatgccaagtgcagctgaggcagaggcagaggcagacgctctcaggttataccacatgcagcaggctgtggcggctgtggcgactgtggcgactgtggatggtagaaaaaaggtcgggccaggaggcgtgaggtgggcacaaagggtgtctcatccagcagcccaccagacacgccattatctgcaccctttttaatttacattatcaccatctctctccagcctctccctaagattcgacactgactgaaacgtcaggctcttaagcatgacgggatgttttgtaatgtggtataaacttctaggctctgtggttaggtgcttcacttccatctgagcctcaccagctctgagccggtgaccttggggcaattactccaacattcggtgcctccatttcttcttctgtcaaatgggaacaatgacagctgtgagaactcactaagattcatacaaacccttaaagcagtgtctgacctagagccaattattatttattacaattttatcaacattctttttcctattttttgccgtcgagctttctgacatgctgttcccccacctggaatgttttcccctcatcttttcatttttggcttcatcaattttgattaactctcattcatctttcaggttttttttttttttttttttccccaagacagggtcttgctctgttgcctaggctggagtgcagtggtgtgatctcggctcactgcagcctctgcctcccgggttcaagcaattctcctgcctcagcctcctgagtagctgggattacggacacataccaccacacccggctaatttttgtatttttagtagaggcggtgtttcaccattctggccaggctggtctggaactccggacctcaggtgatccacccacctcggcctcccaaaatgctgggattacagccatgaacccccatgcccgacccatctttcaggtcttagctgaaagttatttccactgggaaggcctccctggccttttcagctaggtcaggttgcccggtgtgtagaagtcctttttagtttccctcatagcattcatcacgtatttacttatttcattgttttctttgttgaccttagctgaaagactttgatctttagagtgctgaatatatggataattgcatgggtagatgagttactcactcatgtggtcagctttgaaggttaatgtggtagctggaatggaactagaatttggatggagaaggcatagtacaattgtacccactccgggtagacaccaccagcagcagctttactgagtgcctgagtgtgaacgacagtatgttaggttctacctctgttacagttacttgcgtcaaaaatgcagagacatgggcagcaataagaccagccttcagtttttattcagaaagaaaaatgaagacagccaaccatggtcaaagcgcagaattattaacacgataaagactttcttgaaaattgttggcctaggattggaagtttaagatctgttgttaaacaactttggacatctccagcatctttgcaaatctttgttttgagggtgaatatttttgtcattttaaattttatttttgtttgatgaaagaatgttgaataatttattgagccaacaattgaaatgctgtataacagggaagaagagttaggattaacagcgttggtgccatgagaaaagtcgactacacaacttgaactatccagtatgtttttttatgtacagaaaaattggaatgcagaatatgtttttgctattatactttggataagagtctgaaagtttttttcacagttggagtaattatagtccatatattataaaatattttaatagtgaattatattgtagcaatttctaacaagtatgtttatattatctaaatgagagcttttggtattttacatttttaaatttctttttaatttcttaattttatgggttgtgatttgtagtttgatttaattccatatgagcagttatttttgaaattgtcatatgtaagaatgttagtgagccattcgtcgaacatgtccacatagacactactcttgaaatcacatttaattttgagaaataaatccatagaaatctttactgtgtgaatgttagaatgtggtcttatatatatttctcaggggagttatgcttagaggaaaccgatatgatacctcagtggtgctgcattaactttctctctccaaaaatgtgtatatacattttgttgtttgggtttcggtggtttgggtaaaataccttagaatacattgtctcattaacaattttgatgaagaaaattccctttcttagattcgtccaagtctagtccattgttttaaaactgcttttaattttctagagttaagctgaaatatgtaaaactaaagaattatctgaaggaaatatgtgaatctgaaaagaaggctcatactcgaaaccaagaatatttaaagcgatttgagcgtgtccaagctcatgttgtacacttcaccacaaatacagagaagcttcaaaaactgaaggtgacttcctgttttttactgtgttttattttatttgttgttgtgtgtttttttttttttcttcaagatgagacctcactgtgttacccaggctagacttgaacacctgggctcaagcagtcctcctgtcttagcctcctgagtagctgggattacaggtgcacaccccatgtagctgtgtacctcccgagtagctgggattacagatgcacaccccaggtttatgttttgtttttaatcttttttttgctaaaatgagaaataatgagtactaagtttcagatcagtggtagtcactaatgttttgttgttcataattaggattaagtatcagctttttctgtgaattaccatgtggctgaattttatcagggaacttgaaactgcattttccaagattcttctttagttaaggaatcaatgggatatctctaacacaggcaagatcactagccagtacctggcacggtgtaacacatggtatttgttggctgaatgactgaatttgagcagcattggggttctctctagaaactgattctgtcttgaaagggttctttttctgtggtctgggcccctcttctctggcaaacagtgcattgggagagtagtaagggtagaactgtccccgaggagtttgcctttatgctcctggtctgtgtgacccagagtgactgcccttgcagctctctctggttctggcacctttttccccttgaagtgcaggtgcttggctgcctgctgctgcttggcttcctgctgctccacaaattatgccaagtgtggagggccaggagctaggcctttatcctcaccatttgcactggtcaggtgttgtccaatgtaacccatcttaacactggtcacaggaggagttggattcagtattctgcctgctagcctgctactgagcccccctacctttttttttttttttgccctgcagtttttcttcagccttttattgtaaaattttcaaatacacagaagagttagcataattattatgatgaacactcataattctccacttagatgcagtagttgtaaatatcttgttatatttgctttgtatgtgtatttttttttttctctgagccattgaaagtctgctgcaggcatcatgacacttctttcctaagcacttgagcgtggatctcctaaatgcagggacagtctcctacataatcataccattatcacgtctaagaagattaaaaatgattccacaatttgctttttgagacagggccttaccatgtcatccaggctgaagtgcaatggcgtgatcatggcttatggtagcctcaaccttctgggctcaagcgagcctccctcctcagcctcaagctgggactataggcatgcaccaccatgcctggctaattttttatttttttgtagagatgaggtctcactatgttgcccaggctggtctcgaactcccagtctcaagaaattatcctaacttggcctcccagagtgctggaattatgggtttgagccactgcacccagacataatatttaattttcagctcgtattcagatttccccacttctcccaaaaagtaacttatttttccagactaggagccaactagggctcatgtattgttttctatgttattgattattgtgccttttttgtctcttttaatctaatttagtctcctaccattcctccttttttttccccatgtcattggctattttgaaaaaggcagtccatctgcttgtagagtgatccgcattctgaatctaaggcatcatttaacttgcacagcatcccctgtatttcctgtgaactggaaatgtggtctaaacaagcactgtccagtagaattttctgcagtgatgacaatgttctgtatctatgctgatgctatctaatacagctactgctcatatatggctgttgagcacttaaaatgtggcttgtgacactgaagactgtatttttaattttgtcaattttaattaattttaatttaaatagttacacctgaggttatacttccaactgcatcccatcaggaggcccatgatgtcaggtggcccctgggtgaggctgactttgaccccttggttaagatgatgatctctagatgtctctattgtaaggtacatttttttccccttttgcatattagtaactcatctatagagtgatgggttggcatcatgggaatattgtgttccttagtatccttttacctaatggttttagaacctatagatctgagccttgcctgaaccagttatttctagtggaggttatgaaaagtggtgattttctgttttattgtatcttctgttagctgactttcctctataacgaagaatgttttcccccttttctttctttcaacctcttttttttttttttttttttttttaaagcctacaacagcacctggtattcccaggaagtctcccatccaagtatgaaaccggcccaaccctgcttagccttcaagatcagatgagagcaagcgtgttcagggtggtatggccgtaggaccttttttttttttttttaatgttatgatggacttgtgaatttctatttactagtatgttatcaattacagtaattattctttttgttgttttatcgtcttatatttggccaattggagtctctccagattggctcctgtgtccttttgacataaccccgttaattctgagccttctttgatctggggcataacaagatattccaggtttacctcacattttttctccctcagatatggaattaacctcctatccaaggagctgtggttctttttaatggagaggggtatttagaaaccaagatatatggttaaatgtgttcaagcaatagcaagttttagcttcccaattttttcttttagtattcatgaaaaatgtttaaagttcaaaaaaagttgtcattatcaatgttgtaaaccacttttcaaagatttcatggagaaaatgaaagtgatgggcaaaggagggaattttgtcttcccaataaaataaaggaaataatagaacatttctgcttatcttcatattgaggcttcatttaatagttgatttcttattataaccaaatttgagaggaaggaatttgaagggaagaatcatcttttgtaattttttatattgagagcattcattatataaaataggatatgttattaaaaaaaccttgtatgagctgcttaagactatcaacatgggggaccattttaacatgacaaactagataggaatatgaaaagctttattaataaacatggttcaaaaattatgtaggtgttccttatttgaattttggataaggaatgcctttaaaaaaattcttctagtagcgtaaaagaccaaatcatggcactacactcaggaaggatgtgagttccatggagaactggactttggccatcaccctaggtccaaagccaatgaatgtttgttgtgtgcctacgaacccagacagcaatgtcagcgacccctccagtgatcccatcttcttcagcaggctgtgcagtgagctgaggttcaacataggggatgtttgtctctggtgttttcccatttctttctgcttcttccttttgggccagagtccagaggtggcccaggtatgccagaaccacttgtctcctcttaatgctgccatccaggtatcagatgtttacctcctttcttgactgacctcacataagtcttgggagaaaggtgttcacagtgcattgcccacacaccccaaaatgccacaggtattgcaccttgaacagactacagttaatacaaatgaacttcaaattggtagaattccagaaagtgcaaccaagtgaagcagtgtgagagaagtgggggttttgcccaaactgataccaagtgactttctcccactttgtagaggtgggctgggcccagttcactatataatgctaaaatctcctaaaatgagctaaatactgaaaacactgtcaactgattttatgactcataatactttatttggaggcctataataattttcagggcttttaaaggatattgacgtgttatgtagttttgaaaatacagtgttatatctatgctgctacttgtcagttggataaaggggctgaataaacacagttcaaaaatataaatattaggtctgggcatggtggttcatgcctgtaatcccagtgctttaggaggctgaggtgggaggatcacttgaggccaggaattcgagaccagcctgggcaacatagtgagaccccatctgtacaaaaaatttaaaaataaaatttaaaaattaaatttaaaattagccagctgtaggagtgtgcaccagtagtctcagctgctcaggaatctgagatggggggggatcatttgagcccaggaggttgaggttatagtgagctatgatggtgacactgcagtctagccctggcgacagagcaagaccctggctctccaaaaaaaattaataataataaagtaaattaaaaaaacccaagaatgtaaatattagtattaatgctgtgaggagtctgccctcctctccctcattctgcccccctactccctgtattagctgcttttgtagagggggccccagttggtcctaacttaaagcagtttcactcaggtccccattatccttgtctcaggttgggttctccctgaagcagacctggagaacagggatttgacggtaagtggttgatttgggaaataaggaatatcagtaggaaatgggggaagggaggcagggagggcactgggtgtattattaagctagctaccatagtcagcctggcgccaaatcctacagggaacttctggtaagtggtttgcacattcgggatatgtgtccagcagctcctaagcagcattgattgaggactgctgagcaaggttgtaggtggtagggaattaaccaaacactctccagagcagccttcccaggttctgagaagccttaggcacggagccccagattccagaagttaggagtgcccagaaaggtcctagggatgtgtgtagaacgttgccagcatctgccttagcctacctcatggcaatattgccaggcatggggtctacatgtcagggcattcagggaggatccccatggcaggcacaagagtcttcatctggttaggtctctccttggcctgaaatgctggcccaggcttttgaggacaaagcccaggtgctggtctctgcctgcacagagcagcctcacccttattactcctcccaacacacacacacacacacacacacactctctctctctctctctctctctctgtgtttgtctctctcacacaaatacacagacgtgcacattttttctcctcatctctccctaatttcccccctccaccttctcctgccatccccatttctccctcttatctctcccctgtctcctattcctgtctccttgcctcttcttgcccccaaatctgtcttctccagatcctctaactcttccacccccatatcttcccactgtctctctacatctttatctcccgcacacgtacacacacactctctctcacacatacacacatacacactcttacatgcacccgcggtgctttaagcatgctggacaatttgcatttccttgaaagcaccacattatctcatacctccttcaattagaaggcctttttccccctgccctgccttaggtctgtgtcataattatctcagtaagcacttccttcatggtattataattgtttacatgtctgttttcccacttcactgtgagctccttgtcttattatttcaatgctctcagtatctgacccataatatggcacataataagcactcagtaagcattgagacttcccccttgactgaaattaattcttccatattttttgtctcattctgttatggaccatgaactactactatgtgagaactaatgtggtattgatgatactctttattataccttcccagttagcatttctgtttaatagcagaggtattctgaatatataatgtcattatttaaagatgtgattctccaggcctggacaacatgatgagaacctgtctctacaaaaaaatagaaaaaattagctggatgtggtggcatgtgctctagtcccagctatttgcgaggctgaggtaggaggatagattaagcctgggaggttgaagggcagtgagttgtgatcatgccactgcactccagcctgggtgacagagcaagcccttgtctcaaataaataaataaataaataaataaagtaaaatagatgtgtttctccttgaaaattcagtcattaggttatgtatgcctataaggggctaatatttgagaacaagtcttttgaactctgatttggtttctgctgaggattgtgacagacattgtgagcagggcacaaccttcatgcccctggagggcaaagtgtgtagcaaataccactttttatcaaccaaagtgtcttgcctgttaatatgcattagttgaacaaatgaacgttcccccatatctttggtaaaagttcacgatctaagaggaagcacagatattggaaaaaaataggagaagagaaaacaaaagactgtgaagcttagttgcatctctcatactgacttgaggatcaaatcagcccattatgtaactctctgtacccatttcctcaactctaatgtgaggagacagggccagcagattttaaacgtcgattcagttcaattattcacttattctgtaacttgagaattagctgtgcaaccctgaaaaacaatgaaaaaggaaatctgtagcaaaaaaagatagtggtggcactttcaggcaaacagtaaagtgatggaggggaaattgacggaagtgagaatgcagaaagtatcataatggaaaacgtttgtgagcatggagagaaatcccagagacctgaaacttctgccagaacctccatcaatcctccatcaatctgttaatcgttgttaacagatttcattaattcagctgaaataaattacatgtgcatactgaggaagtaaatggaaaggttctgctaaatttaggtgggcagcatcaagccagtgctgtgaagcaatacagtgacagacagaacaagttacctgatggattaactcagtgctcttgggtttattaaaacagatttcttgggttggggcaggggagataagggaattatttatccctagaggggctccagaccaggagatgttactggggcatgagtaggctctggagagcgctgtggaaaactcctgctctccagtgttccggacatggataataaccaggtgttgtatgcaaaaataaaaaagaaaaagagaacaaagtattttttgatggaaatccatggtcccaggggatatagacttacattctgtatcattaatttatcattgtatctctctgacttcattgtgcgatttctgtttgcattattaatttagctaaagagtatctacagttgagtgactttttcagttgcattgagagcagtctaaattgggcttttaaagatacttctttctgttctttaggaagactttatgcagttatcacttcctttttccttcagcaaaatgaattgaataaaactctcatatttctatgagaaagtgctctgtctttggaaggtatggctctgaaatgatcctataatgaggaaatcaggtacaatgctcattgatctcaaagagcgtaagaaaacatttgtagtcacaagaaaaaagaatttttatttaacctgtaattatatgtttatattgtaattcatcccccatttctttttgagatactatcccttggaatctgtaaaggatgcctgtttaaagctcttggggctaaaatgtaaacatctctaagttcagaggaatagatatggaacagagagatgtaaattgtatctttgttattgctttatctattcctagtttattattttatcatttgtactggcctgataaaattttcatttaattgggtatctatttagagaattactgccatctatcatatagtactctgctggagaaaaaaaaatccatacctaactgttactaaaaatgagacagcatatattacctttcaaaatattttgagggaaacaaatcagtttggttattattgcccatttgtttttcgtatgtcaaaacaaagctcaggcctattttatgttcagagaactaaggaaacagctttctcatttcatctcataggtgtgtttctaattacagtgcatacctgcctaatttagaaaatgttctgatacttatctttgatggaccacaatccatgacttttttaaggctttaattactagcgtactgaatcaaagtgcttttttatgccttgcttttaagaaaaagccattttaagattgaatcactttcaccaattatagtgtggtgatgatgcagacatctttatgtagttattagtgccagagcaaattggtttctgatcattgatgtctgcagtatatttttattcatagaaaatggaatttgttttaagttgatgatctagcaagtatgctcaattgctgtgacgatcagaatcatgatattttgtagatatcatatagataagaaatcagtaggattgattttttttgtttgtttggggcaaaacttctaaaaggaaacactgtctaatgtgctactttcataataaaggaattgtatttttgtgataaagtatcaaactgtatacatatatatacacatatacatgtgtatatatataaagattttatttcctaagttgatgaaagtaaaaatccatcaaatcttattttatttaaaaattgtagcattttgtaaaattcaacttttgatatgtgtcatttgcaaaattgttcattttctaagataaggtgaatttcttggcaacatcagcttttactttctacttcaatgctccctgtatgttgtaaagaccgcagtatacagacaggtgctagttgtaaaaatatttatcacaaaatcaaactttctttatatttagctcgaatatgagactcaaattaagaagatgctatgctcaaaagatagcctgggactaaaagaggaactgacagatgaagacagagaaaaggtaataaactaaattggtaacctttctgttaacagaggaattctggagtgtttatatcttgagatattgttttaaataaaatcatcttattaggaagatccctttgattaaaccttacgtgattatttaaagatttttgcttacagaatattgctttaatgtctaatttaattaagtttgctgaaagggtgttactttgtgaagaaaggatagactctaaagaaaacctcagtgttgtcagtaggtaaaattgtttttctaaatcatgccttgtagctgctcttttcttagtttgagaagtgttttaaatgaaaagtaaacaaaatatggcattttgattcttttatttgtgcgaatatacataattttgtacattttaacctttgcacagaaaacgtggaaagaaaagattgcatatctaagcaatagacaaaaagatcgacaaggaatacttaaataaattctgctatgtatctgctataatgcaggcttctaatcctcctgcctatctccatataaatgattctgttcaagaccgtagatgttttcttcactaaaagcagtaaagctcttttagatgaaatgtctaaaaacatcttgtaataacttggagcatgctggcaagagtagtcacttgtgactatgtgtgaaaccccctcagccagtcgatattgtaataagcaaaaatggtagcatcactccattattcagaaaagccaacagcgtgcttgttccttaggctgcagcattcattaagaaaagcttactgggctgaaagctggaaacagatgataacgggatatgattttcatatttaatgctttccttggaagagtgtgtgtgctacagattgatagaagaatcaactgctactttactaaaagactttcaggtttgccctatagctaccgatggaatcattcagccaagaaattaactttttctccttttacctgctttatatatctgctaagcaggctgcctggctgccagtaaatgttattatgcagttaactgttgggtatttaagactcttatcagaaaagaaacagaggccacactattttgtttttatagtaggaggaaggttttagtttttctttcttccgtgcattagcaggcattaatctgagtttataggaagttttcgttttccttcctcatagattaaaaaattaaaaaaaaaaccctagaacttagagcattctttaaactgtaagatacaaaacaccaagccccagcaaccttgacctatataaaaaggctttaatgataaatgacgtatatgccattcgatgtaggccaaatgtggtatgatgtgatagaattttagagcattcaggcagtttttctatttgatattcggtcatgaaataattgatgtgttttaatctagaagccagttagttctttctatgccattcttgatagacatattcttagcacggcagtgtcaatggtacttcaggaaaacggaagctttttttttctttatttacccactgattctttaccttgcatgtagttgtggagtctccttttaggacatatttaaaattagggcaagagacatacagttgacaaccccttaaaatgttacatataataattagaagtcttttcatttatatggaaaggtgtcatttccttaaaagctttgactattggctgtataagaatcgattaggtaacactttgagaaatttatattttgcattttctaattttccattgatgttcaaccaattaaaaggtaaatacatttcagcaaaatcatgttttagttaatccttatactaattcctgaaccattccttatcatatgagttatagcttattgtttagtggaaatccaagcttctcttctttgggcagtcatatgaattggtcttggtcattgacctccagggcctttcctgaagcatagtacagtcactggttgaatcaataaatagttgttaagcatcagttctctttgagaagcaacagtaggcccctctatgaaggccacaattttcttaccttcagagtgcttctcagaaagcaatgttctttctaaggcacagaatagtgtgtgataaagtgccagtcacgtgggacaaacatgagcaatgagaagaaagaagattctgcttcctgtgaattgagtaatcccagccctggtggaggaggtggtgtgtgagctggcatagaaggatgtgcaggatgccagtcagtggtagaaaatgagcttggaaagctaccttgtgggatttggtacctggaactatggtcccaggctaagaactgagatttcctcctggaatttgtgtgtgtgtgtgtgtgtgtgtgtgtgtgtgtggcagcagatgaaggaaggacttgtgagcagagcagtcacatcccatgtgtgcagctgcgggaagatgaggctggcagtgctgtgcaggatgagcctggggaggagtacgtggaactgaggaaatcaggctccattcagacaggaggaattaacagaatggaggacctgtattggggatggccattgaggtggaaaacactaacaaaggggagaggatctatcaaattggtgatcattctgaattataaaaaggtattttttaagtggctatacagctttcaaccataggcagtaacttggatgccaagaaaagtcatcaagtggtgtgtgtccattttttaaatataaaaactctggctcagttttggtgtaggacatctattatttgcttgcatccagtagttgctctttagaatcatacattcgcttagaaggattaatagttagtctgttcatctgccatgcttgtttccactattaatttacttagtcagcttacaaaaaatgtgtcttaccaaaaaggcacatttcaagccccactcagatcctcacaaattttactatagtaattcttcacctctattatatatattgttattttttattttgggggcaaactctgtttccagacatgttcttctggttgaagaacggtgactagagaatatacataaaaacacataaaaatgtatgtcctcaagaaagattgagatggcgtttttgaatgacagtatacatttggggatagggttgtaaggtttctttgaactattatgctgtgaaatatattctactagaaatagaagcaaactgatcatactctgtcagggatggataggtgtggaggaccagggaatttcatcacagagctgaaggcttgttgaggagcttcacttccactgtggtaaccctccctgcaaggatcaggtgggagaatggttataaaggtgttattcccacttttaatactggtagtaacaatgggtaataatcactgcacttttactttgctaggtgctgcgttaacactttatgtgtatcaactcatttaatcttctcaacaaccctggaagtagaggatattgttgtccccattttatagtaaggctcagaaaatttagttaacttgccgaaaactacacaaccaggcagaaccaatattcaaacccagaccactggacttcagcatccatgctgttaaccaccttgcagcaatgccctctaaggtagtatgggtaaaagatagtatgggtagctcttcaaaagttggagaaattcctggtgaaataaaaacaactttaaatactgcatttttacctagacttgagggaggaaatggtcttccttggtgctgtagtatttgagctgaatcaggtgagccatggcaagctgaggacccgccccctaaactgcccatgtttgcaataaaagaagcgtccgtttcggttggctttgttgggcagaagaaatgccttacaactcgactgaagaagaacttgaagggagaaagcctgcacggccacaggaggcagctgtgtgcctggtatgcagggatgagctctgcagtggctttagccacggatctgagcatgtgtccgaggtgctcccaggagcagtgccactgcaggagaggcacacgtcagagaagacagcaccccagtatgagatgatggaaagggttcttccattccagatgtgttcccaggatctgagcaccattcataagaccaaggcagccactgtaggacctggctcatctccaaggagtaaagggaccagataccttgtgtgggggaaacttgattgaaataaatattgcagcaagggagaaaggaatcctaaaactatactgaaagagcaagtgacttaggttggaatcccctgggaaggaccctaacacaaggatttgagtgtaagtagtttatatgggaggtggtcccaggaagcacagatagaaaagagaggaagatggcatggggaagggaaagcgggctgtaagagtgtgtgattgagtgggttatcactcatagcacctggtgctcagtcccattggggaaccttggatgactgtgtagggcatgcctcagggatatcccattcaaggagtaggaaagggaggtttttcccctccaggtctgtcactaccagagtgccacgcctggctcctcttctggtgctgcacagcagctgagagaaacgcttgggccaagaggcacaggtgcttagaggaggacactgggcaggtactggaatgatgagggcccagggatatgggcccgccctctcacacctgctaagggaaataacagtgggtggaggaggtagaggttattcctttgagttctctgtataagcccgatttcttatccttattagcccacagtgccaccttcaccagcagcctccttgaatcactgctcaactataaacaacacaaaaatctccctagacgggggctctgagcagttgccttcacggggaacgtggccctcggttctgccattctcaaagttatggctgtacttgatttagacagagccatgacaagtcaaaaagtagcctctctgtgttcagctggacctttttatattaactgatttcttatttatatgtgtttgtattcagaaaacaattagaaattaacccgaattacacaaattgtatttcaagccctggccctaaaactacatctgcagatctgcagacctttttttcaagagagggtagaacatgctcttctctcccagctcacttgacagtaagcttccacatggcagggcccagccccttcttgcctgccacaccaccccacagcaccctgcacctggtgagtgatgataacctgctgacctgaaaggaggaagaggggtgggctgctctctgagtgaagggtactccccatttcatgtggtgttcgagggcagatgacatttggactctccactcctgcttttgggggtgccttccaaggagctggtggggagtgtggctctgatggacagctcccccatgggtctttcaggcactattctaaggattttatataatataggcgtatagaaatacacattggttacagcaaccttacaaaataagaactattttaatacccattttacagattaagaaatgggagctcaaataagtaacttaatttcttagtcacacagctagtaagtggcatactggtctggagtcttaataaatacatcagtctgcttttcagttactggaagaaaggatttacttaggaaaatggtgggagagggccttttttaaaggtattagctactctctcatagtcaagaaggaaagacagtatttttataacttacccattgtggggacatttggctagccagctgtcttcctttgctcttctctgtggcagtattctgtggcaagtgtattatgtgacagaggctctaacaagtgagaaaatcgtattcacagatagaggtgcctatcgtgtagtggaatgagggggaagagaaaaaaagtggatgagaaggggaaaagaaacgtaagtcaatttaacaagaaaaagataaatttttgtggggaaacactgtttcttttctccttttgatagtagaaaaggatttatagaagctccataggagaacgagtattgagttcttgttctttagaagactttccaaattcatatagtccatgaaatactgtattattagaaaaagatatacttcatgcagtcttaaaaaaaaagttagtgcctagaactttcttggaaaagaatctggtagtaacagtcacgatgaatacacacatatgctttgtgccagcagtcccacttttggtaatctgtgccctagaaagaaaatcttttgttcaaaacggcaaaaatatagtctgcgtgttgcaacattatttgtagcagcaaaaacacagaagcagcctgaatgagcagctgcagaggagaggctgagctagggagagagagcaccctcatgatcaagtattctgcatatggcgcccagaatccagtgcattcctcatgatctgggcagcgtccaaggaatattattaagagagcaaagcaggttgcggagagttgcttacaacatgctctcactttgtacaagtggccaaaccttaccagcaaggaattagttgtcctgggtttgaaggaaggtgtgaataggcatcctaactggtttgcttcagttacttcatggaggggagagggaggcaatgagctggggaaaataagtaacttgttctttacatccctttgccttatgtctcatttctataatttaataatttttatacgattttaaaaattaaacctatgaagaagggatgagcaggtggttagttcattttaggaagaaggagcctgcttgtggttgagactgttcttttaattgtgggggagtgtgagttgcttacgtccttactcaaatccctcagaattatagaaaattggaggtgcctttctatccctctgatgtagttctgcatatttcttttgtgaatggagatctctaagagagttttatcctgagttaccctatttggggatggtggagcatatacaggggatattgaattgtattataaaaagaaagggctgttaccttgacagttttaggtatttgttaagcctcttaggaagtgttacttgaaaaccataacttaactttgtattactttgaccaagacaattgcttaggcctacggatgtgaaacagtggttttggggtgttctgtttattttgtgaaagttacctgctgtcactattttggaatgccgaatttctcttgaagctcatacctgcttttctcttactcttccatttaccccacatagactaggttttatttatcatatacaagttctattcagggtctatcttagtgagatcagattttgagttatttgaagttagaaattaggcacaggcttcagattcactattagggatttttatgtttgtttttaaaagctgtggttcagtaatgcaatttgagtttgactgactcagttttgaatattgtagcataagaggtttgcattggagtcctggtatctgagtttaaatcctggctctgtgaacatggacaagttgctcaacctggctaagtctcataagagtagggctaataataatgattgttttcataatataaatctcttagctcctccttgtcacctcgtacatgcttgataaatgttccctgctcttgatgccaccgtcaccaccatcattaccattgttgttctccactagggtagccttactttgatcctggattcttgccacttatttaagatagtgaagaggttggtgtgggggtagggagactacctatgaattgaagaaataggaggtaatagcacttgatggtgacaattcgtaaagattgattttgtgcaagataatttacagaatacaccattaaagcctaatttaacagatatatcttaaatttagatagttccaataactgttgaatttcatggccagagatatctctcgatggtctaagttgtgagattttggtgatgactacatttgtcatggtggcaacatgtaagaagaagacttaaaaatcacaatggcatactgtattagtttgctagggctgccataacaaaataccacaaactgggtggcttaaacaacagaaatgtgttttttgaagttctggaggctggaagtccaagatcaaggtgccaacagggtcgctttctggtgaggcctttctccttgagtcatagaaggggccttctcactgtgtcctcatgtgccttttctctctgtgcatgaactgagagatcattggtatctcttcctcttataaggacaccaattctattggattaaggtcccaccattatgacataatttaaccttcattacctcctttaaggccctatcctttaagccacagtggggattgggacttcaacatatgaattggacacaattcagtgtgtgatacgtgtatcatgtaaaatatgtataataattttataataaacatataacttcaggattgttggatgtaaattattgttaatggatttttaaaaatcttctcaatgtgacttaagaacttgcttacatagaaattaaaaacaataattgtaccatgtgagaagctgaaaatttggtctaacagcttcatttctgttctgcatttaacttgctgcttctcattcccttgtctgtgaagataataagaagaagaaaaataaagatttccttagcattttgcaaaacatgaagtgtaacttttttttcaaagtatactagtggttgaggtctgcctttaaatgctgtagttcataatgattaagacatcattacagttctaaacttgttgatctcttcttatgctcactcctcttctttcccccagtaaagatgaattcctgatttttaaaagttatcttctgttcactaataaatattttcagtcatgttcatgtgctttgctattgcttcccacaactcctaacatttttcaagactgcagatgaataactgtgacaagaagagaagaaaactgaactaaaatcttggattatagatttatctctagcactcaactacagaaagtaataggaaggtgtggaaaagttggtcattatgtcagatccttaaatactgatacatgctgctgcttttggcaataacatctgtctctcaaaaacttttgaattcctaatattattcctgtgtcaacaataatgtgaaacatggcattctgttttcagcttccctggctcagaaactgctttgagaagacacataatagtgttcagaatttaagattaaagagtactctgtttcctgttgctaagctaataaaatgacagacttttaaaaaagaagagacacctgtcttagagcctgatctcagcaaatgggaaacctgccagcctacagaaactcagcttacatttcactggagccagtattttacgttgcaagtgtggagctagttcaaatgcagcattgtcttatagtgagcagcagttaatttttgcaagtttctcattttttgttataaaagtttatataattgccggtgggaatgtaaaatggtgcaaacactttggaaaacagtttggcagttcctgaaaaagttaaacatatagttaccgtacgaggcaacagtttcattcatagcatagcattcaagcatagcagcttgctgtgtacaagattggacaccaaaagtggacaaaagtttatagcagcattattcatagtagccaaaaagtggacacaatttacatgttctcatctgatgaatggataaacaaactacagtatatccttaaaatagaatattattcagccatgaaaaggaataaaatactgataaatgccacaaaatggataaaccttgaaaacattgtgctaagtgaaagaaaccaatcaaaaaagacaacatattatacgattccacttacatattcataaaatgtgcagaataagcggatttttacaaacagaaagtagattaatggctgcctagggctggggactgactggggaggatggggagttacgctaaaaggtatggggtttcttgttggagtgatgaaaaaaatgttccaaaattgattgtggtgatggtcgcacaactctgcgaatatactaaaaacccactgaattgtatgcttttaaaaggataagttttatggtatgtgaattatatctcagtaaaatggttttcaaaagtttaaatttaccgtatctaagtatttttgttatgacatagtctttatttgcctcatttttatgacttcatgacctttccctattttatagtcatataagttgcttccaactttttatgatttgaaataatgctctacgtgaacttgtttgtccacatagctgctttttctattagctttatttccttattatgatggatttccatatagaattactgaatcaaagcaacaagcatggttaggacttttgatgccagattctttcctacgaggattctgcccatgtattcagccaccagcggtgtgacagcttctatttcacctaaccttcctcagtactggggggttataatttttaaaaatcatctttattttacaataattttagatttgcagaaaagttgcagagatagtacaaagtgttcccttggatccctcacctagtttccaccattgttaccatcttacattaccatgccacacttggcaaatctaggaaaccaacacagatacattactgttaactgaactctagacttgattcagatattgccagtttttccattaatgtcttctttttttgctgttccaggacccaatccaggattgttataattttaatttttaaaaattcaatataatgtttatagaatggtattacattgttatcagtcttagacgtagggttataatggagctgaaaaaattcctgttgcctaatgacttaacattgtagtgtaatgcattcctgacatgtttgtggtgatgctggtgtcaacaaacctagtgtgctgccagttgtatgaaagtatagcagaaacaattatgtatagtatataatacttggtgataataataataaatgactttgttactggcttattattggcccaattgacaaaattggattatgggttgtggaatagaaaacaagataatatcaatgttaaattttctgattctgatcatgaactgtgctcaagaaagagcgtgtctctgtgcttttggaaatgctcactgaagtgcttagtggtagataggcagggtgtcccaacttaccctcaaatggttcagaaaaaaatcatagcttatatttaggtatacacacatacagagacaaacacatatatgtagagggagagaaaatgataaatgggataaaatgtaaacatttggtaaatctggctaaacactgttaagggagtgttttgtattatttttgcaatgtttctgtaagtgtaaaattatatcaaagtaaagccacgcatgctgatgcacacctgcagtcccagctacttgggagactgaggcaggagggtcacttgagtccaggagttcgagtccaccctgggcaacatagaccacatctctataaataaaaaaaaaattgtttaaattatgtcaaaataaaaagttactggttcctataaataatactggcaacaactagaaatagtgcgggaagacaaccttcctattgagttgaagcagatcctcaagtacacgttgccttttttgggcccttggatgaatgatgcatcgtccacagacttttatttttacacataattaagggccacttttttataattgttaatttgttacaggccactaacatgccatgtacttattaattagtatattactagagtttgttgaggacccagagttcagtattccaagaagtctggcaatgcttggcaaaattgcaaaacagttaataactacttgctgtcacagagagtggtaaatactcctctttttgggaaataaacctctgctaacagtgttgtctcttgaattggccttattttcactttctgtagttctgaagcatttactataagtacatcatggttccctgctacttttcctgactatgcagattaccaatctgttgtttctctccagttcttggctctggattcgttgttcagttttgcctatcttagggggttggagacatttgagaattactagttgagagcagtaactcaggggcacttcctttggccctcctcaggtgtctttctcatatctgaaatgtgccttcttttgtgctttggcttggcctttagcggatcaaaagaggaaggtgcttaggcctgccatgtcctccctgtgctgggttagtcgttgctctggtgttggtgcattaacacttcataaactggtcttgaaaatgaaaaattaaaggcttctcagactcctaagtctgatcactgatttgcttcatgtctccaccaagtaactgctattgcacagccactctgaggcctcagcccttttagccctgctaaagtctccatagtagcccatcccttagagccatctatttacacaactagtttttttataacaggaaaaatgaaagtagttgttagattacagtagtggtaataggtaatttttcctgttttaaaatttgtctttgttattatatcagtgtaatatatatcagcttttttattacaaaaggaatagaagacacagtatattatgaatactattcatattggtgagtcagaatgttgattaatatcattttgctgtttaaaccatatggtataatggaaaattctttaaaatgacataatggcctctttggatggtgaaatgacagtattctgtaaggcaggcttgacccagcaatttcagttctagaaaagtatcctactgataaacttgcctgtgtgcagagagacatacactcagggataatcactgcagcatgatttggagtggaagatggtgggaaacaaaccaatgtccttcaatagcagactgtttacataaattatggtacatctatagaataggataatatgcagctgttaaaattggatataataaaaactataattatataatgcaaagtatgtcaccctttacgcacatacctactagtgtatccaggtcctttctgcaagaaacttagagttgctttctctggggagaacagctagaggactaaaggatcatggaggtggaacttcctttttcctctatacttttctatcctcctggatcttcctgcttctcctccctctgtggggagagatgggagagatgtacttttcctaatttttttttgagacagggcctcactctgtagcccaggctggagtgcagtggtgcgatcatagctcactgcagctttgacttcctgggcccaagcagttctcctgcctcagtctctaagtagctgggaccacaggtgtgtgccaccatgcccagctagtaaaatacatatatatacacatatatttatttatttatttattattactattattattatttttttttatggagttttgctcttgtcacccaggctggagtgcagtggcaagatctcggctcactgcaacctctgcctcctgggttcaagcgattctcctgcctcagccccctgagtagctgggattacaggtgcccaaatattttttaattaaaaaaattttttttaatttttaattttgtagagatggagtctcactatgttgccaaggctggtctcaagttcctgggctcaagcaatcctcccatctcagcctcagggccgggaactcttcctaatctcagattagctgcataacttaatttcttttctaaggattttttattcatttgttcattttctttttttgtgatagctttatagtttttattatattcagagttgcgcagccataatcacaatcaatgttagcatactttcattcctgaaaaagaaaccccatacctgttgggaatcactgtttacctccccccgattccttctactccccaccacccaccccagcccttcggtccccagcctggggcaaacagttaactacttcctgtctctaaaaatttgcctattctgaacattttctataaatgagatcttacagtatatggtcttttatgactggcttctcatttagcatgatattttcaaagttcatccatgatgtaacaggtatcagtaattcatctcttttcatggctgaaaattattctcttgtatgaatgtattacattttatctagtcatctaatgttggccattggagttatctccacttttggctatcataaataatgttgctatgcacatccttttacaagattttgtgtagtcatatgtttacactctccgtacttctgcctagatatggaattgctggttagatggtaactctgtttaactttttcaggagctgccaaactcttctaaagtgggtgcaccgttttatattcccatcagcagtgtatgattctaatttctccacatcctggactacactcgttattgcctgttgtagtgaattcttataattttatgttgcctcagcatccattttaaatctaagttgaaccttctcataccagaagcaggactcagtcacccctgacacagttggcagttccaccctccttcgcagttcctcagtgtggtcggtccagataacctgccttacacagctgctctctggtgaccacttccctatgggacagctggatgcagcctgcttgacaggcccttctgaccttcgcatcccccatggaccatatgccacagtgaccacctctcagtcactgggtaacctcccagaactcatgcctccttgctttaaactcaccagttaaaactccccaggctgcctgtgggaaacctgtttggataacacctgcgactcagtaaagacattggctcatgtgtccttcccctcaacccctgcttctaccatgtaaggacacgggtcccttttctctctctctctgcctgcgctccctgatgtttgtgtgtgtggcctccaggtgtgccatgtactccccagaacctgtaagtgataatgtctttatttccatctcatatttctcctaattattggaggggtactctccatcttaaaaatcctaaattaagacacctgtcattcttagtatagccattgatatgggctgaatatttgtgtcccccccaaagttcatatattgaaattctaatccccaaggtgatggtttttgagggtgaggactttgggaagtgattaaatcaagggggcagagccttcatgggtgggattagtttctttataaaagaggcccgtggaaatttgcctgccccttccaccctgcgagcacacagcagaaagatgctgtctgagagaaagcagttccttaccagacccagagtctgctggcgcctgccttgatcttggacttcccagcctccagaactatcagaaacaaatttctgttatttatgcactgtttatggtattgttatagcagcctgaacagaccaagacagccatcatagtgggtaaagtgatatcttattgtgcttttgaattatgtttctctaatgaataatgatattaagcatcattttatgtgtttattggccattcatatatcttctttggagaaatgtctatccaaatccttttcccacttttaagggctgtttgtctttttattatgtagttatatgacttctttatgtattttgggtactagacccttatcagatacataatttacaatattttctcccattatgtgggttatattttcactttcctgatgacgtcttttcaaagcatgtatttcttttttcaaaaacatattctatactttcttttttttgagatggagtctccaggctggagtgcagtggcatgatctcggctgactgcagcctctgctgcccgggttcaagtgattctcctgcctcagcttcctgaatagctaggatcacaggcacctgccaccgtgcccggctaatttttgtatttttagcagagacggggtttcaccatgtcagccaggctggtctcgaactcctgacctcagatgatctgcccaccttggcctcccaaagtgctgggattacaggcatgagccaccacacccggcttactttctttactatatttgttttgtgaactatcattgttattaaaattaaatcctatggactttactgctttttgctcattcattatgtaggaagccatgagtttaataatacatggtaggtgctgatttcaataatcatgctttgtttgacctcctttcatttctggaaaaaaaaaaaaaccccacctaattgtttatacacagtatgtttaactcacatctcttttggtgttgcaggttgcagtgcacgaggggattaactcaggaacagccatgtcaagaggattgtatcaaccagcaacaatctttatgggccgccaaatgtcagccatcttaagcatgagagatttcagtacagagcacaaatctccccagcccacaaagaacttttcaattcctgacccacattcacaccgacagacagcccagagcagtaatgtgacagacagctgtgtagtacaaactagtaatgacacacagtgcttaaataagtctgacaacatagatggaaaggcatctcttcagattggtgagaaaatgccagtcacagccagtgtattgtctgaggaggaacaaactcattgcttggagataggaagtaacacacgtcatggcaagagtaatttatctgaaggcaaaaagtctgctgaactcaattccccgttacgggaaagattaagtccagagaacagaaccactgatttaaagtgtgacagttccagcggatcagagggagaaatactgacacgggaacatattgaagttgaggaaaaaagagccagcccgccagtctctccgataccagtttcagaatactgtgaatctgaaaataagtggtctcaagagaagcattctccttgggaaggtgtttcaggtgggatgagaggctgagtttggttgctgatttttctgggtggtagtgatcttatgtaaggacaaaatatactaattatctctctttcataaaatagtatctttgccaacaaattccattctaatgaactcttaaatatgtacatgggagtgaatttgctgatttttaaacccactgtgatttttttaaacatttgaaaacgtgtttaagcttttaagttccgtaatgaattgtgtgtgggttgcttctccatgtttttaactgatgagtaattctgctgtgtgttaccttgcttcctcctgaagtcagtgattggtaatcagttcatgtcgccacttgcagatcatcttgctcacagggaaccaaagtcacaaaagcccttcagaaaaatgcaggaagaggaggaggaaagttggagcaccagcagtgaccttaccatttcaataagtgaagatgatctgattttagagagcccagaaccacagccaaatccaggtggcaagatggagggagaagatggaatagaggccttaaaattaatccatgctgagcaagaaagagttgccctatccactgaaaaaaattgtattttgcaaaccctaagctctcctgattcagaaaaggaatcctccactaacgcaccaacaagagagtaagccattcaattttttttttctactgttctgtttttaattgtagacatttctagagaccattccactgggaatgtattatcgagcactcagccatgaatgtgtaaattccttaagtctcataagtaatcttgtaggcaagacctaattttctttctgtccttctttcttctttctttccttcctcccttccttctttctttgacaaaaaaactttaaaagtttgaatatcattgaatcatggtgattgcagcttataattatatacacataatccctggttaacttataagtcattccccaaccccctactctccaggctttcagaaaataaatctgttttgaagttttggtaccacagaaggtgacagttaaacttactaggaatgcagcattagagtctgagaactttatgtctaattaatttgcttaatccttatattccttgccatattatcatttttgtcatctgattaaatatgagttaataagttcttctaattgtatatgtaagccagatttccttttttgaatctaaataggaaacattagaatctctaatgttaaatgggaacatcagcattatacatttgagaacttatattatccgactgataaaaatttgtatatgtttttgtgctactgattggagacgctagaagaaaactttgtagaaagttcttgtgtatctactatgtagaaaacttgttaactgttgaaaagtgattttgtgctgaaaaatggcattaataacatcaaatctcttttaggggtagaaggaacctaagtaaacaacctaaggtagatctcaccttttacaaatgaggaaacgaaggccggggcagagtggtgtcacgtaggtctactggatctgctggggcagaacaccccacagcctgtctgcctgaatgtcacaccactgccccacccccagaattttctgttacaccgtaatgctggtcaccctttcatttccacaaagctggcagcagtgaaaagccaagtgggcctttttgtacggcatatgttctctttagaacaccattgtaccttttaatatattgcctcttaccattcattgtctacttatggtgaaaagtttatgaataggctttaattgatagattgtatccaaactgatgttcaggaaatatttattaagagcatatccaagtacagagttcttgcactatggatggaagaaccgacatggttcctgtcattgggaaatttgatttattggagaggcaagccaaatggatttttctagtaataatacttctctcatcaaagaggcacaggtaatacatattacatcatcagaaactttattactggaggtagaatgttatctatctctagttttgtgtttgtgggcttatttttatggcatggtggacaagttagtactttggtaggctaacaaggggactaatacacttacccaggactcagtctttttctgaggtgaaaaaaattgagtatgtgtatgaattcctactaaacatttctctaagagtcaagaatgttcatcctgtctccattcgaatgacttttttttttttaatgatcttggaggcataaagtcaagctccttggagttttggcatatagttttccagtatttattggaaaatatgggcatgtggggaattttgagtatttctcttaataaaatgcccccagaatgaaaatgtcagtcagcagtggttgtttctgtgtctgtattatcaaatttgagcctactgattttctgggtaaaaatattctccaggaataggttgaaggtggttttaaatgatgctagttaacttgctgacatcaccactgcatttgaggccccacattttcttaatttattgtttaactggcgctcttctcctttgctctgagggttattggtctgagaccatagcatagcatcatatttatagagctagcactataacctaaacagttcaatatttcaattgactttagggtctgttgggggcctggagaaaaatcacttgaatgaatttaattagcaaagatgcataaatgggacaaaggaggacacataggagcatatgatccagaatgtaaaatctgcgcaacatcctgaagtctgtataggctttgaaggagaaagaggagggaaagagcaaatagggtctggaggaaaatgcaagaaggaatgcggagcagagaacacagaggacatgggaggggcagagcaaaggaccccatgggtgaggagggccttttggagttaaggttcaaaatgtcacctagggtgaggttgagaaaggcctggaatatcaggttaatgaatttagagttcactctatgctttgtagagctgttgaaggttattttaggagaaggacagtgtgatgaggcttgatttaggaggattaacctgacagcattagttcattaggattaatcatccatgtggtaggcagaagtgtagatggccctgagattcccgctccctgttgtccattcccttgccttgagagtgggcaggactgggagtctgatggattttactcctgtgatgaagctgtcatgtgacaaagatgaaggattttgcagatataatgaaggtcccaaatcagttgcccttcagctagtcaaatgaaaattatccaaggtggacctgacctaatcagatgagactttaaaagagactggcccttactgaagccagtggcacaacctcagctcgctgcaacctttgcctcctgggttcaagctattctgcctcagccttacaaatagctgggactacaggtgcccgccatcaggcctggctaattttgtttttgtttttgttttgagatggagttttgctcttgttgcccaggctggagtgcaatggcgcaacctcggctcactgcaacctccacctcctgggttcaagcaattctcctgcctcagcctcctgagtagctgggattacaggcatgtgccgccatgcttggctaatttttgtattttgtattttttttttttttttgtccatgaggcattttatttgtaaatatatgtattacatccctagaaaaagaattccaggattttccctcctgtgtgttttcgtcttgcttcttcatggtccatgatgccagctgaggttgtcagtacaatgaaaccaactggcaggatggaagcagattattctgccatttttccaggtctttgagttgcacgtcaaatctggagctgatcactccacacttgtttagcctgcctgtgaggttcacaacaatttcccagctctgtggtcatcaatgatttcaaattcgccagtgtaaccatgcttcatcatcacaatgagaaaccggacgatgactttggagcacggcctaataagcacctggcgtttgcctctcttttcggcattgttgatggtcttgagagcatctgccaggacattcatgcgcaccattgtggcggtgcggaaagagcttttgtatttttttttttttttggagagacttggtttctccatgttggtcaggctggtcttgtactccctacctcaggtgatctgcctgcctcagcttcccaaagtgttgggattacaagcgtgagccaccgcacctggccaatttttgtatttttagtagagacccggtttcactatgttggccaggctggtcttgaactgctgacctcaagtgatttgcccaccttgtcctcccaaagtgctgggattagaggcgtgagccaccacgcccagcctgaagccagagagatttaaagcagctaagatactctcttgtttcctgaagaagcaaactgtcatcttgtgggaaagaccacatgacaggaaatggcatgcagcctctaggggctaagggcctcagtcctacagccacaaggaaattgattctgccaataaccagtgagtgtggaagaagtccctgagccttagatgagactgcatctccagcagacaccttaatttcagcctggtgagaccttgagcagatgaccccactaacccagatccagacttctgtctcatgggaactatgaaatcataaatttgtggcaatttgtgatacagcaataagaaaattcatacaactcagttgaagaattggaagcaaggattgcatggatagaagtgtctacccataatgactgggaacaggctgaattggacatgttcagggttccttgtgggaacacatggtaacaaagtagctgagtgagtgattcagcagccaaggtaacctgtgcttcccctccccttataccttcaccatctgagcaagtgcattttcacactcaggtaagcagtagtggaacattatagactgctagggactctaaaagtggttgtggctatctacattaaccaacaagcagtttctcatgctagtgggttttttgtttgtttcgctttttttttttttttttttgagatggagtttcactcttgtcgcccaggctggagtacaatggcacgatctcggctcactgcaacctccacctcccgggtgcaagctagtctcatgcctcagtctcccaagtagctgggattacaggcatgtgccagcacatccaactaattttgtatttttaatagagatggggttttaccatgttggccaggctgttctcaaactcctaacctcaggagatttgcctgccttcaaagtgctgggattacagacgtgagccactgcgcctggcctactttgttttatatatcaatgcataatgatatgtatccacctttaaagtaccattaaaaaatagtttcttttttttattattatactttaagttttagggtacatgtgcacaacatgcaggttagttacatatgtatacatgtgccatgttgttgtgcttcacccagtaactcgtcatttaacattaggtatatctccaaatgctatccctccccactcccctaccccacaacaggccccggtgtgtgatgctccccttcctgtgtccatgtgttctcattgttcaattcccacctatgagtgagaacatgcggtgtttggttttttgtccttgcgataatttgctgagaatgatggtttgcagtttcatccatgtccctacaaaggacatgaactcatcattttttatggctgcatagtattccatggtgtatatgtgccacattttcttaatccagtctgtcattgttggacatttgggttggttccaagttacatttggattggttccaacttacaagagatgtgaaggacctcttcaaggagaactacaaaccactgctcagtgaaataaaagaggatacaaacaaatggaagaacattccatgctcatgggtaggaagaatcaatatcgtgaaaatggccatactgcccagggtaatttatagattcaatgccatccccatcaagctaccaatgactttcttcacagaattggaaaaaactactttaaagttcatatagaaccaaaagagagcccgcatcgccaagtcaatcctaagccaaaagaacaaagctggaggcatcacgctacctgacttcaaactatactacaaggctacagtaaccaaaacagcatggtactggtaccaaaacagagatatagaccaatggaacagaaaagagccctcagaaatgatgctgcatatctacaaccatctgatctttgacaaacctgacaaaaacaagcaatggggaaaggatcccctatttaataaatggtgctgggaaaactggctagtcataggtagaaagctgaaactggatgccttccttacaccttatacaaaaattaattcaagatggattaaagacttaaacattagacctaaaaccataaaaaccctagaagaaaacctaggcaataccattcaggccataggcatgggcaaggacttcatgtctaaaacaccaaaagcaatggcaacaaaagccaaaattgacaaatgggatctaattaaactaaagagcttctgcacagcaaaagaaacaaccatcagagtgaacaggcaacctacagcatgggagaaaatttttgcaacctactcatctgacaaagggctaatatccagaatctacaatgaactccaacaaatttacaagaaaaaaaaaccccatcaaaaagtgggcaaaggatatgaacagacacttctcaaaagaagacatttatgcagccaaaagacacatgaaaaaatgttcatcatcactggccatcagagaaatgcaaatcaaaaccacaatgagataccatctcacaccagttagaatggcgatcattaaaaagtcaggaaacaacaggtgctggagaggatgtggagaaataggaacacttttacactattgatgggagtgtaaactagttcaaccattgtggaagtcagtgtggcgattcctcagggatctagaactagaaataccatttgacccagctatcccattactgggtatatacccaaaggattataaatcatgctgctataaagacacatgcagacgtatgtttgttgcggcactattcataacagcaaagacttggaaccaacccaaaaaaatagtttctctacttgaaaatgacctgtgctccatctactcacccctcttcctttaaccccacctgaaccccttgcaagtactgatctttttagtgtcttgtcttttccagaatgtcaagtagtgggaattacataacaagtagtattatcaggttggcttttttcacttagtaatgtatatttaaggttattccatgtctttttatggcttcatagcttatttatttttagcactgaataatactccattgtctggaggtaccagagtttatccattcacctactgaagaacatcttggtggcttctgggttttgccaattgtgaataaagctgccataaatatctctgtgcaggtttttgtgtggacatgttttcaacttatttgggtaaataccaaggagtgtcattgatggatcatgtgtaagtctgtttttggtatggggttatttagtttttaaattttaaatttttgtagatacatagtaggtatatgtatctatttatagggtacatgaaatattttaatacaagcatgcaatgtataataatcacttcatggtaaatgggatatccatctcctcaagcatttatcctttgtgttataaacaatccagttatactcttttggttatttttaaatgtacaattaaattattatttactatagtcatccttttgtgctatcaaataccaaatactagatctttttttttttttttgagacggagtctctctctgtcgcccaggctggagtgcagtggcacgatctcagctcactgcaagctccccttcctgggttcacgccattctcctgcctcagcctcccgagtagctgggactacaggcacacgccaccatgcctggctaattttttgtatttttagtagagatggggtttcaccgtgttagccaggataatctcgatctcctgacctcgtgatctgcccgcctcagcctcccaaagtgctgggattacaggcgtgagccaccacgcccggccatcaaatactagatcttattcgttctttctaacttatctttttgtatccgttaaccatccccacttctctccgcccccgaactccactacacttcccagcctctggtaactatctttctactctctgtctccatgagttcaattgttttaatttttagctcccccaaataaatgagaacatgcaaagtttgtctttctgtgcctggcttaaatcacttaacgtaatgacctccagttccatctatgttgttgtaaatgacaggatctcattcttttctatggctaaataggtaagtctatggttacctttgtaagaaactgctgaaccatcgtcttccaaagtggctgtgccattttgcattatcactagcaatgaatgagagttcttgttctacatcttgtcagcatttggtattgtcattttaaaattttagccattctaaaaggtgtttagtggtatgcaattgttttaatttgcagttctctaatgacatatgatgttgaacatcttttcatatgcttatctgccacctgtgtatcttctttgatgagatgtctgttcagatctgtcacccatttttatttcagttagttttcttattgttgagttttaatagctctttctacattttggatatcagtcctttatcagggggatagtgtgtcttgcagatattttcgcccaatctatggtttgtcttttcctttgaacagtgtcttttacagagcagaagttttaaattttattttttaaatgtattttgtttgtttgtttgtgacagggtcacactctgttgcccaggctggaatgcagtggtgtgatcatggcccactgcagcctcgacctccccaagctcaggtgatcctgccacctcaccctcttgagtagctgggattacaggcgcgtgccaccacacccagctaattttgtatttttagtagagatagggtttcaccatgttggccaggccagtctcagagtcctgtccttaggtgatccacccaccttggcctcccaaagtgctgggattacaggcatgagccaccatgcccgaccttttgctatatgactttcgaggttgagttatacataaaaggccttgcagtgtctaccctattagctggaactctcactatgggaaccacaagccaccatattgaaagtctgatcattctaggcagctgtgctgaagaaattatgtgtaggtgccccagtccatagtccttgctgagccttatccttccagtcgtccccaccaaggtgctggacatataggtgaagccttcttggactctccagacaaatccatccagaggctaaatatcactaaatgccctctcttgataatatgtgaaacagaagaatcacccagccactccttgcctgctttcctaatccacaaaagcatgagatgtaatgacttggtggttgttttaagctactaagttttgaggtagttttttattagtctatagataacgagaaaaggggtacattcatttaacattaaatatggaacacctgctctgtgccgggtattgttcttgctttatggtacttatgatcatgcatgtggagaagaggaaggaaatataaaccagtaaacaatctgtgtgaaaagtattatgacaaagggccaggcacggtgactaacgtgtaatcctagcactttaggaggctgaggcgaatggattgtttgcgcttaggagttcgagaccagcctgggcaacgtggtgaaacctcgtctctacaaaagatgcaaaaaaattagccaggtgtggtggcgcacgcttgagctatttggggagggtgaggcaggaggatcacttaaacccaggaggttgagactgcagtgggctgagattgtgccactgcactccagcctgggtgacaaagagagactctgtctcaaaaaaaaaaagtattatgatgaagaataagcaggttaagtagatagagaaggcatgggtgcagtttaatacaagatataagatagtggggaaaggtctctatggtaagatggtagttgagtaggacctgaagtgggagagttggtaagccacattcagctgtgcccatgccttctctatccacttaacctcatctgttctttgtcatcttttagactggtttatgtgtttgtctcttagtttatacttcttctctcctctgggagagagatgggagagggatgggatatgtcttgagaaagagcatgctaggcaaagggaaccacagtacagaggccatgcagtgggggcatactgagtgtttcctggaacagcaaagtggctggtgcacctgaatccgaacaggtgttggggagacgggagaagctggagtgagagagtatcagtgtgccacgttgtgaagggtcagtaggctgaaggaaggactttgggttgaacttcaattgaaatgaagaatcactctggccacttatggaaaatcaagttggggaaagagtggcagcagggagtgctgtttggataatatagcagagatcctgcagagaggtgctgttgctttggactgtggtggcagcagtagggtggtaagaagtggtcagattctggatatatttttatataaaagaaccagctggagggctgggtgtggtggctcatgcctgtaatcccaacactttgggaggccaagatgggttgatcacttgaggtcaggagttcaagaccagcctggccaacatggtgaaaccccatctctactaaaaatataaaaattagctgggtgtggtggcgggtgcctgtaatcccagctacttgggaggctgagccaggagaattgcttgaacctgggaagtggaggttgcagtgagccaagattgtgccactggactccagcctgggcaacagagggagatgccgtctcaaaaaaaaaaaaaaaaaaagaaagaaccagctggattctttatggattgggtgtgggttataagagaaagggagtagaaggatgactcaagggtttggggacagagtgagttatttattgagataaggaacatgtaggaggcacagacttgaaggaaagaaaatcaagacagaagttttgggtatgttagatttgagatgcctttttgacgttcacagggagatgctgagtaggcagatggatttcatgaacttggaattcagagagaggtcagggctagataaatacatttgtaaatcatcagggtataaatacattttaaagccatgggcctaagaagaacactagagagtgaatgtaaataggaaagtggcccagggcatgactccacattcagggtcaggaagatcagaaggaaccagcaaaggagtctcagaagacgctgcagggaagaacgaggagaaccaggagggtgttgtgctgcaggtgccaagtagaatgtttcacatgaggtttagaaagcttaaataacctgctcaggtcacagaggtgcagctagggtctaaactaacagtctgatgccagaatgcatgctcttaatttctgttttccaccacccaaatcacaaccaaaatggttgttagtactgactccgtgccaggcactgttttaacacctttatttataatcatttaatcctattatcatcatcattttacagatgagaaaactgaggcacagggagttatgtaacatattgaaagtcataaaacagctgtgtgtgctccaaactggccctctgtgaccagagttaactggtaccctatgctgtctcccagtgaatctttactacctggatagttggagtatcatcaaagataatattttataaggttaaataggaagctcaaaaagcaaattaaattctttaattagaaaaagaaaaaagaaaagaaaactaagcagtggcaatttgacctcttactccgtccatattgatttttgtgctttccaacctcaaataggccaatgaagtgctatgtgcctttattcaggcttgaacaaagtacttgcaaagttgctttgttctgtctcctcctggagtgtgactgaaaacagaatgtaatgctgccttttaaactaagtcacatgaaagccttggtttctcaaggtcataaaaatgtgatcacacagattgaatcccatccagtgattttaatttagctcctcttcaaagttaagtgtaggaaataagttattgcatctgagaaaaatttgttgctgaaagtcatgtgcctggaataataggtttgaactatgttcatttagaatttaccctgaattcactttataaggagctggaagcatatttagaaattcagcattccttcagatgtgatgatgccttcagatgtctgttctcagctgtctgttttcatcagcacagttgcctgtttctcttgaacatgacctttggcacctcaatactggtggcccctgagccttttcttgccaccacacagattctgtcctttgttcccaaagtaaggctatgcattatacttctggaaaaataacccagtggcagtagatgtggccgtcagggtattccctttgttttctacctgtcacttcattctaatcttgcctttgcttttcctgttagctcacctagtttctgaaaaatctaagactttcattatccttattttggtctaaatttgtaaaaatccaaacctactaagaagggaatagtcctgagacctgatcctcagcaaagtaggcaataatcgtagtcacagccattgtcacttggtgtataggagatattaaaagaagtctccattggccaacaggaatgaacccaggtctccatcctttgccagccatctcaccatatgggattctagcctcagtcagaagaacatgagtgacatggagcaaaggcaggagttagataggaactgagaagcacttggtgaaggtcacagcccaggtcaccagaagactgaaacctaatccaagtaccataaaaggcttcccctcccccataccttgccaccacatcaatagggatcctgtatagtagcaggaaacaattatacaactgaatgaaccacatgtctcagaccttagttaagtctctaggaggccaggcatggtggctcactcatgcctataatccccaacactttgggaggctgaggcaggcatatcacttgtggtcaggagtttgagaccagcctgaccaatatggtgaaagctggtctctaccaaaaaatacaaaaattagccagtcatggtggcacacgcctgtattcccagctactcaggaggctgagttgggagaatcacttaaatgcaggaggtggaggttgctgtgagctgagatggtgccactgcactccagcctgagcaacggagtgagaccctgtctgaaaaaaaatggaggctgggcacggtggctcacgcctataatctcagcactttgggaggccaagacaagtggatcacctgaggtcaggagttcaagaccagcctggccaacagtgcaaaaccctgtctctactaaaaatacaaaaattagctgggtgtggtggcgggtgcctgtaattccagctacttgagaggctgaggcacaagaattgcctgaacctgggaggcagaggttgcagtgagccaagatcgcaccactgcaccctatcctcagtgagagagtgagactctgtctcaaatcagtcaatcaatcaatcaatcaatccggaaagctgaagacaagggaaggagacaaaaacaaggacacccaaggaaagtttagcctctgatacctacatttgcagctgcaacagacaataaacacagcctaacttctaaccagatgaacataaaacctcagcttgaaggcctgtgtacctgttcaccctaaaggactatttacctagtacatcatgcctggctttcaacaaaaaacattacaaggcacaaaaaaggcaaaaaaaaaaaaaaaatacagtttgaatagacagagcaagcatcagagccagactcagatatggcagatgttggatttttcagactaggaatttaaaataactgattaatatgctagggctctagggctctagagctctaaaggaaaaagaggacaacgtgcaagaaaggataggtaatgtaaacagaaagatggaaattataataaagaataaaaaagtaatgctagaattaaactctgtaacagaaataaagaatgcctttggtgggcttatcagtagattggacttggtagagaaattatgtctagcttatttcacttagcatgttgtcttcagaattcatccatgtcaagatgtgtgtcaaaatttccttcctttttaaggcagaataatatttcattgtacgtgtattttctttgtccattcatccattgatgaacattttggtggtttctagatcttcgctattgcgaatagtgctgtgatgaacactggagtgctaatacttctttgagatccttatttcaattattttggataaatacccaaaagtgagattattggatcaaatggtaattctagttttaattttttgaggaatctctgtactgttttctattttacactcccaccaacagtgtactagagttccagtttctctacatctttgccagtgcttgttatcttttgttctttttgtgaatagtcgtatgaactgaaatttttctatggttttgatttgcatttccctgatgattagtgatgagcatcttttcatatacctcttggccatttatatgttttatggagacgttgaagaaatgtttattcaggtctttagcccgtattttaatcaggttattagtttttttgctgttgaactgttggagttccttacatgtttgggaaattaaccccttatatgtgttttgcaaatattttctctcattcagtagattgcctttttgctctgttagttgtttcctttgctatgcagaaactttttagtttgatgtagtcccacttgtctatttttgcttttgttgcctgtgcttttggtgtcgtatccatgaaatctttgccaaggccaatgttatgaagcttttcccctatgttttcttctaggagttttaaaacttcaggtcttatatttaaatccttaattcattttgagttgatttttctgtgtggtatgagagtccagtttcattcttttgcatatggatttccagtttctcccaataccgtatgttaaaagactgtcctttcctcatcatatattcttgatacccttgtcaaagatcagttgactgcatatgcatggattgatttatgggctctctattctgaatgttccattggtctatatgtctgtctttatgccaataccatactgttttgattatggtagctttgtaatatattttgaaatcaggacgtgtgatgcctccagctttttcttctttctcaagattgtcttggctgttcagggtcttttgtgattccacatgaattttagtcttgtttttttatttctgaaaaaaaatgccattgaaattttgatagcaatttcatagaatctggagattgctttggtagtatggacactttaacaatattaaatcttataatccatgaacatggaattctttccatttgcttgtatcttctttaatttctgtcatcaatgttttgtagtttttagcatggaagtcttgtacctccttaattaagtttatttctaagtattttattcttattggtgctattgtaaatggaaatatttttctaatttcatattcagacagtttgttgttagtgtatagaaacacaactgatttttgtatgttgattttgtatcctacaactttactgaattcatttattaattctaacagtatgcatctgtgtgtgtatgtgatctttagagttttctatatatcatgtcatctgcaacagggacaattttacttggatttgaatagcttttatttcttttccttgcctaattattctggctagggctttcagtactgtattaaacagaagtggcaagagtgggcatccttgtcttgttcgtgatctcaaaggaaaagctttcagctttcaccattgagtatgatattagctgtgaactttatatatgtgacctttattaagctgaggtaatttcatcctatgtctagtttattgagaggtttttattgggaaggggtgttgaattttgtcaaacagttattctgtgtctattaagatggtcatgtgatttttatctttcattctgttactgtggtgtatcacattgatttttatatgttgattcattcttgcatcccagggataaacatctcacttagttatgatttatgattcttttaatgtactgctgaatttggtttgttagtattttgttgacaatatttgtgtctatattcattaggcatattggtctgtagttttcttttttgtggtatctttgcctgggtttggcatcagggtaatgcgggcctaataaaataagtttggaagtattccctttttttcagtttttttggaagagtttgagaagtattggcattaattctttaaatgtctggtagaattcaccagtgaagctatctggtcctggggtttttttgttttttttttttttttgatgggaggtttttgattactgattcagtctccttactagttttaggtctgttcagactatttctttattaattagtcttggtatgtgtatgtttttaggaatttatttatttcttccaggttatccagtttgttggtttgtaatagtttatatagtttcttgtgatcttttttaatctctgtgatatcaattgcagtgtttcctctttcatttctgattttatgtatttgggttttctctcttttttcttaagtagtctagctaacggtttgtcaattttgtttattttttcaaaaaagtcttagttttattgattttttttcctattttttgtattctctttttcatttatctctgatcattattatttccttctatctactaactttgtgcttggtttgttctgtttttctacttaaggtgtgaagttaggttgttgatttaagcttttcttctttttaaatgtaagtttttactgctataaacttctctcttatactggtcttgctgcatcttctaagtttcggtatgttgtatttttgttttcatttgtctcagatgttttctaatgtccctgttgatttattttgtgatccattagttgttagtgtgttgtttaatttccacatgtttgtgaattttacaattttgcttctgctattgatttctgatttcattccatttcatcagagaaaatacttggtatgattcagtctttttaaatttgtaagacttgttttgtaagctaacacgtgatctgttctagagaatgttttgccagcacttgagaagaatgctattgcgtttgggtggagtgttctgtatatgtttgttaggtccatttgaccagtactgttattcaagtttgttgtttctttgttgattttgtctggttgttctatttattattgaaaatggaatactgaagtctcccaccagtattatattgctatgtatttctcctcattttcaaactcaaaaatctgtgagtttttggtttgctctttgctcctttttttttttttttaataaggaaattcaggcagttttttaaaaagatgatgacgatgacaactcttttcctagaatttttttcaccattttatatttaagtaaattatgacattttggggcagtctcccaagtaagtgttaaggtgccctacccccactctcttggagccaaataagtggtagggggtggggcgagggacgggtgcaaggggaggaaaagtcaggaaggctactgagagcatagagccgacttcagcctctgttgggaagggaaccagcagtcaagccaaatcctactacgggtgtagcaaaactcaacttctttcaatacgaatttgagatctaagagtagtttattctggtggagcaggcttacccatggtttcagaagttagagaggagactctgagagtcaagccctggttgttcaagacccaaataaggcaggagaaagcaggacataggcaggtttccaagaaaatgagcccaatagcattcaagcctcagtgacaggccaggtataggtactccagtcagtagtcccagctgagcccagtagttctagcccaagctccagatgtgagtttaggaatcaccaaataattccagtccctttattccaagtcaccctcagatgttcaagctgaggccccagacatcatggagcacagacaagccctacccatgtccagattactgaaccacagaagccatgaggattataaaaagttgttggttgttgttttataccactaaatttgggtagtattttattatacagcagtaggtaaccggaataaccatgatgactggtttggctagttgaaggagattcatcattccagattttgagggctgcagtatgaacagaggcctggagataagcaagcatggcccgtatctgggaactattgtttctccaactgaaggagtggctcacatgccagcaaacagcaccactgtaggcccaggggatgcagtcagggtctgcaaagtgtcttttcctcacctctccagtccgcacacaagagcagccacctggtcttgcctcatgctggcccagccacaccaatggcaagggttctattgttaactcagattttttaaaaggacaaagaggagacatgttaggggcaggatgcacatttgtcattttaaaatatctccttaaattcttttcaatgaaacacaaatttgaattactgaaaagccatctatccaagtttttttttttttttagacagggtctcactctgtcacccataccagagtgcagtggcgtgatcttggctcactgcaacctccacctcccaggttcaagcgtttctcatgcctcagcttcccttgtagctgggatcacaggcatgcgccaccatgcctggctaatttttgtatttttagtagggatgtggttttaccatgttgcccaggctggtcttgaacttctgacctcaagtgagccaccctcctcggcctcccaaagtgctgggattacagatgtgagccactgcacctggcttctgagttcttttttaaaacttagttttctggcattgttgaacattcagctattatcttgatatatcaggatgctgttggttgccaataacaggaacactgtctgaaacacagatgcttaaacaagaagtgcatttgttctgtctcatttctggaagtccagaggtagagcaggccatggagttggttggtactgcccatcacttttgttgtcaaagacccagatcctttccatttccctgctctgacatcctcagtgttgacctcttcctacagccaggagcaaagtggcagcagcagtgctattatggactaaatgtttgtgtccctctaaaattcatatgttaaagctgtaaccctcagtgtgatatttggagaagggacctttgggaggtactttgggttagatgaggtcaggaaggtagggctgtcatgatagaattaaatgcacttataagaagagacacaagagagctctgtctcgcccccaccgtctgaggacacagtgaggagtcagaaggtggataaataccaaggaccccatctagacaccacagccttatatagcttccaaagacagaaagagactctcttcttgagtctctgttagaagcaaggaaagtattcaatagacttccccttgcatcttgttgactaaaatttgttcacagacccattcctaagctaattactggcaagggttattataattgttctagactaaggaagccttttctatggaagaccaaatagtaaggccaggcgcagtggctcagccctgtaatcctagcactttgggaagccaaggtgggcggattgcctgagttcaggagttcaagaccaacctaggcaacatggcgaaaccctatctctactaaaaataccaataattagctgggcgtgttggtgtgcatctgtaatctcagctactcgggaggctgaggcatgagaatcacttgaacccgggaggcagaggttgcagtgagccgagattgtgccactgcactccagcctgggcaacggaatgagactgtccccccaccaaaaaaaaaaaaaaaaaaagaccaaatagtaaatattttagacttcttttctcctctcccctccctctctctgctctttatctctttaaatatgtgctcaagagctatacaacagcaggctgtggctggatttggtcactcctggcttagattaatcacagtctactctggaatgaggcaaggggttattgccccatgagttatacaagggagaggttgattactaaacaaaattggggtcccatgaaaaggaagaagggagatggacactgagtaggcaactgcacgattgctaaatttggtccaaagaaaggttagtagatgcagagaacagccaaagggactgaatctggagacaactctaccccagcaaggtgtttgtcctgtgactggtgggttaaaatgggaatgcaacaggcaagttgtttgtgatgaataggtattgctttcataatcagaaaaaaaattaagaccatctttcagaaatgttctaaaattcgattgtgtgatggttgcacaactctgagtatactaataaaaaccattgacgtgtacattttaagttagtgaattttatgacatgtgagtcatatctcagtagagcagttaaaaaaagaatctcttgaattccaaagcttaaaaaccatggaccgcagctctgtggtgcttgctgtttagaggcaagggcgcctttggctgtgtggctagcttcacggctttcacggatggccttggaaatcttcccataatgggaatgcttttaatgaccatttctttttacatatgtgctaaatatttttcaggccatgcaaaatattttacattttataatcaaagaattagcatgcttacaataaaaataaaactgatacagaaacagtaaattacaggatttttttttgtcccttttaaccctttttaaagtgtattttctctttttatgcagtaggactcattcactgcatatgtcaatgcagcccagtggtagacagtcttcaggctggctttgcccaagcctcagatggtaccagtgggctctgacttctctgtttccctctgatctactccgtctggatcaactcagttcttaggccctgcagctggagaatttttccctggcatgctgaatcagaggctgtcattggctctgaccacatcatatgcccatcccctacacaatcactgaagcaagggcagagtccattggcttttacctggatctcatgcttcactcaagctgtatgggttaggataggggagtagtggttcgtcagaataaaactgggttctgttaatggttgccaggtggcagacccaacactttccttctctgcatccctgacatcttttttttttttttttttgagtcagagtctcgctgttgttgcccaggctagagtgcaatggtgcgatctcagatcactgcaacctctgcctcctgggtacaagtgattctcctgcctcagcctcccaagtagagctgggattacaggtgcccaccaccacacccagctaattttttgtatttttagtagagacggggtttcactgtgttagccaggctggtctcgaactcctgacctcaggcgatccacctgctcggcctcccaaagggctgggattacaggcgtgagccaccacgcccggtcccctgacttcattactgcctgttgttgcccatttcattcttccttctttagttctatgtggcatactttccctttaattatctttaacttatagttctcacctttgaagaatagcagttgagcttctagtgacagacttttggaaaaaccaagtttgttttaaggtgggatttgacaaagaaccttcaagcttgataactgagtgggaaagcttcccttcagtgagggaaaagtgtctgcaggtaggccaggtgaatgagacaccctaaaacttgaaagttaagcaggaaataagactttaatgtttcctggggcctcgtgtcgtggcatgccttttatcccagcactttgggaggccgaggtgggaggattacttgaggccaggagattgagaccagcctgagcaacatagcaagaccttggctctataaaaataaaaataagttagtcaggcatgatggtacacacctgtaatcctagctactcaggaaactgaggtgggaggcttgcttgagcccaggagttgggaaatacagtgagctatgattgcatcactgcattccagcccaggcaacagagcaagaccctgtctcaaggaaaggaaaaaaataattgtgtgtgtgtgtgtctgtgtgtacgtgtgtgtatgcacgtgcacgtgctttctgtacttttatactgaatctattttgaatttgggttggaagctttagaatattaccttaacctacaagagagatgtgaggaatagttctgagtcccctatcttttatggctttcaactatttttctcactttttttctgacggttttcctttgtcagtgtaaattcattttgatttgcttgttattttgatggactggaaatgtgtttttaaatctgaaaacagtactagtttcaaatttgttttctttactgtagtgattctcagatatattttagtaaaattattctaccttttttttttttttttttttgagacggattctcactctgtcacccaggctggaatgcagtggcatgatcgcggctcactgtaacctctgcctcctgggttcaagcgattctcctgcctcagcctcccgagtagctgggattacaggcagccaccaccacacccggctaatttttgtacttttagtagagacagggttttaccattgttgcccaacagggtctcgaactcctggcctcaagtgatccacccaccttagcctcccaaagtgctgggattacaagcgtgagccaccacgcccaaccctacttttttttttttttttaaacagagtcttgctctgttgcccaggctggagtgcagtgacgccatcctggctcaccacagcctcaacctcccaggttcaagcagttctcctgcctcagcctcccgagtaactgggactacagacgtgtgccaccatgccctgctggaattattctacattctaagttcataggaaaattaatctttgaattttgagaaccgtctcaaaattggtttactaaaacttgggcacctgctatatagtttgcctactagaagataataaaatgaatgagagtaccaaatgaaaaataatggaaagtatggaagttgctgatctcgacagattcttaaatcatggacgtatgtgttaatggtttgatttttatattgtgtacatatatttattgtttactagtaaaaaatgttctaatttatgtgataaatggaatatatcaatacttcatggcaaaaatttttgtgaatttcaggtgttctgccaccttaaacgttgaaaagcactgctttccaggatagccaaatccctaaaagaatttctggtcatgagactgattatccttactgatcagctgtgtcacacatcacatggacatatgatgtccatgtgatggactggactgggcatggttgttttaggagcatgactggcatctgtaatcatgagtacacttggaatccgtttcttccgtttcgaaaagtccacttacccggaattgggacttgtctgacatcccctaaactctgacactgacaaaagaggtcattgcatctggttcccagctacttccatactttccattatttttcattcggtactctcattcattttattatcttctagtaggcaaactagatagcagatgccaaagctttagtaaaccaattttgggaaggttctcaaaattataaagagtaattttcctaagaacttagaaaagaccactttactcaaatgtagaataattctactaaaatatatctgagaatcactacagtaaagaaaacaaactcaaatctaacaggctgtcctaggagagccagttagcttttgttgttttcttgcttacatcccgccttcccttcttccacacttaatccatttatccattcataatacttgttcttgtccactttcatttttcttatttcttctttttgtctttggcttcctcttagcagcttcttagacaaacaagcacttgaataataaattgattcagcatcttcagtttaatacagggcaggttgagcatcccaaatccccaaatccaaagtccgaaatgctccaaaatctgaaactttttgagtgccaacatgatgaatgtttattggagcatttcagatttgggatacttatattccaaaatcaaaaaataaaaattaaaaaaaaacacaattcaaaatctgaaaaaattcaaaatccaaattcccaaccatttcagataaaggatactcaacctatattgatcctctaagggttcaacagcaaaccagcccaatcctttcagccatcctatatttggtgtctaccatgctcagggagcaggaggcatgatattcataagccaggcatttcactgttatcatggaagtagaccccgagcaaagtcagaacccaggatgggacctgccctactcatctgagtgccccctcagtggaggataactctgtactagacccattcccattcatcagactaaattggcctctgtggagactcacttatcctagagaagtgacatggcagcttatttcagggtctcagcattgcctgagccgaaattcagtaagcctatccaccgtgccatcatgccttcttgtttcccttctccctgaatccgctcacctagtgtaaccctcaccagcccagtctgagcctcctcgtctcctctcttaaacacacgtgtatatatggatagaaacagacagacagacatggaacaacacagcagagtctgatgttttgttttatggtcctgcgtcagccgttaatcctcacaaagataattctaccttgacaacaccagataccttttcatcatcatcatttaacctctagagtttaatgatagaactgattataatgtctagtaaattctttatgatatgtttgtagtattttaaaactttttgaaaatacagagcctaattgtattaaatttggggaaggcataaagttgtatgataataagacatttaccctcgttgggcctcagaaaatgacaccccaaagggaaggccccagaagtaagtttctctctgatcttctcccactctcctgtacctcagcctcattttctcagaggtaagctttagaaactagaattccttttcctcaaagtgaatcataaaaacctgaacccattttccccaaagccagccataaaacctaaaaatattactcgaatttccctcctgtatttctgtggcagagttggccgtaaagaaattctctaacctaccctgtttgattgtgagtcgtaagactccccatttcagaaagggtcctgccccataccagggaggaaggaacactgcacagagacgccaagaagaatgaacagacaggcctggcagagtttccccactcagtctgttagcattcaatcatacttaccttcttggccaagcacagttctacatggttgtctgttcttcactgaacttcagcataaaaatggaaagttttcccaatatccttaggtcttcaatctgaaggctgccatgtcacagaaaacaatgatcaaataaaatttgttttgttttcttctgttaacctgtttgttataagggtgttgactgtgacccttatgatgaggaggaaagggatcaccccttctgaccctacaccctccacattttttttttttagtagatatttaaagcggtcactttaggtagctggctccataataagccctggagatctgttttgcattttattttatttatttatttatttatttatttatttatttatttttgagacggagtcttgccctgtcacccaggctggagtgcagtggcacgatctgggctcactgcaagctctgcctcctgggttcacgccattctcctgcctcagcctcccaagtagctgagactacaggcgcctgccaccacgcccagctaatttttgtgtgtgtgtgtttttttggtagagacggggtttcaccgtgtcagccaggatggtctcgatctcctgacctcatgatccacctgcctcggcctcccaaagtgctgggattacaggtgtgagccaccccgcccagcctgttttgtattttattttaagagacggagtcttgctatgttgcccaggctggtctcaaactcctaggttcaagcagtcctcccacattggcttcccaaagtgctgggattagaggtatgagccaccatcctgcatgctgtttatgcatctcagttggagaactcagccagcaccctaatgacttcacccttctatggctgctgatttggaagaaacccagggaagcaagagtaaattttcccaatctttacctgtccagtcaggaggattttttcaacctgaaaaaaacagaacccctattcggttaaaggggttaagtttgggatccatagaattaccaaagagagaatgctattcatttcataaaggatgtctgccaccattacaaatgatccttggctattaaaaatgggtgattggttcaggcggtttaagggtggaggaacaaatgcgtgatgggttctctctttaagggtggatggaaatacctattaaaaattctcccaagccttccagctcttcattaagaaacttttttaaaaagtcatatgggagagggttcgttctgaaaattaaaatggaacagaatgatgaggtctattcagaggccaaagtggggaaaaggcaagggttttgcttgtgcagcctgtgctacaatgaagaggaccttagtacagacggatggtgccctaccaaatgtagcccataattcaagctgtcagcttcatcacactgtttccaggtaaagagaaggagcccttgtttcctgggtaaagagaaggagcgttgtttgctgacccctggtccacagcctgccgtggtcgcctcgctgtgctggcctttgtgttgctgtcccctccttccctcctttttggcattgtgctcccttcaagtggccccctggaagggaccacccagggggctgcacaatggagattgaggtagccacaaaaacacaggttttgtaagacagccctttaaaagaaaaatactgtttaactatgtatgtgtttgtcctttctacaactgttttgtgtggcaaacaaaaccctgtatacaaacttcactgtggcctcacatacagctgttccagccatcgggtgtcaggcttgagatagtcgcttccagtttattttcccaggacactaattcttgatgtagtttctagttacatgcttagatttatggccaagaaatgtgatatcaaaacaagcaaattgcgctggctttattaaactattttatcagtagtcctcacagttgacggctgggcattgctcctgggtgaaatttgcctgtaatgctgcttaacaaaagctagcagcccggaattcagttctcaatagccatttacacctctgtaaaaggattagcgctagccaattgttacactgtttaaatcttaatttgcatcactatgggggtagagcttctacagacctctctggttcccagttgaatttgtgtacctgtggatgggagagtcactagagatttctcttattgatgaaggtgctaaattgcctcgggataaccggtatgccacaaatattgaattagcctctcaggttccaactgacagacaatagtctgctttggttcattagttatattttatagcagttgtggtccttgagtatttggtacttggatgcattcttctacatctgtttcaagtaaaaattttcatgggtcttaggaggattttaaatgttgttatttgtaagtagcaaatttccttgggaattatatgcaaaacaaaaaacagaacgtgatagttttaaaagtaatctttttctatccagaccatatgtttttaaagatcaaagcctttttatgtttagaattgccctgtcaatagacaatagatgaaattgtcttttcataatgtaaagctggaactacacatcagtttcagatgctcagcctaggcctgagtgaattctaattgtaagatggaggaggagggaggtggacagggagggaaactagcaggtcaggagcatggcaggaagagagggtattaaactacattaaatggatgaaaattgagggagtttggaatgcttggttggaatgaaaacaaagcttgggacattttaatgaccaccttatcaccacttccaccatttttccctcataaagcatttgttcatttattcaacaaatagttactaggtatccatctcatgcatagtgttagccactgaatttagtgattattgcacgtggagtaaaaagaattgtcttggttgctgagagtagtcaggatggtaaatataatttaaacagactttgcagcctgcaagttttccatgtaatagacatgccaggcagaaggaaagcagacacaactgcttataaataaatattgcccttttaagaaacattaaagaaattgaatgcactgggtggaagggcttttggggaactccccaggaaaggttgttttgagtctatggcgaaagccaggccagccattcctggggaggtgagccacagcaaaggctttggtattccaagaaagcaaccacaactaaattattttttgttttttaactttggaaaattttgaggcagtgactggatgctcattgatcctcacagaggctaaagaaatcgtcatggtttaaaaattaaaataactgaaataaggaagcctgttcattttgctttaatgtatctttgtacacatgctaaaagagaacagggggggaagcatccagaaaggaacttacaccttagttgatttgtacctgagaagaatttttagtatatgaggttaaccaacaagtttgttttgttttttggagaggaggtagggcttgtttaaaagaaagaaaaaaaaaaaaagcagccccaaactctaccagtgtaacagtaaaaggagtttagtgagagaaggcagtaaagcagcccggagctcccttatcgagaatgttttagtttcttctactcacaaaccctctttgttgggaactgtccaaccccagcttctgccggcggggaggggtacactgggattggaagaagggaaaccagggctccaaggagcaggatcaggacggaaggtagggccaaccccatgaaaagacagaagttgagtttcctagccagtttttctgtgtcactggaaaacaattggaatttgaaacaaaggttggctgccttgcctcttcccacctttctgaatacaaggtatttctgaattacatgttcatcacttagggaccacctctccaaatgataccattttgttgttcatttctggattttttttttttttttttttttgcgggggagggtgttattttgtttgattattagcgactgggttatactatgttgcccaggctagactccaactcctgggctctagcgatcctcctgcctcacccttctgagtagctgggactgcaggctggagccaccgtgcctggcttgcttcttttgaaatacaatttccttccctaaaattttattctggatgtgatcaactacagtgctctgtgaccttcagtctcactaaaaatatagtgacaacattttataaaacttctaaaaagtaatatgtaaattatgtaagtgtaagtttccctgaaaaatgaactgacaaaaggcagattaataggagaaaagacttgcaaaatttgttttgatatgcacagcacagggaaattgcagaagaatgattatccagtaacccattggggtatggatacttttttacccttcttcataggggaggggagatggggaaagctggcaatttggggcatagtaaatgatttttaggggaaaatgaatggacttgaagaacatacagtggcctgggacaaagtctgtgtggcctgcagagtagacagtggtttgtgaggaaatctgtccagatgtgttgacagccttagtccttctttctgcagtgtaagttgagttaataaaaattcagagaagggaccataggtgattgttttcttcttccagcaggtccagactttaggcagataaaggaacttcagagaacaattgcatcctgtgctttgagagacaggagggaggtgggggagggaaggtcagagagaccttgcatctctgcttcagcccagcatttcaaaatgctgtattttgggatatcagcttctgagccccaatgttggcaaatttgttactatttatgatcagagatcacaccattttgagattgctattccttggagaaaataaaatctgcaaatcaagcctattgtgccgcaactgaaacacaaaaatttaactcaccaaaaagataacactggcaggaatatgtaaaagttatctgatagggttaaggaaaagtttattttctgtagccctcatacagggtcatttttgccaagaagtaattctcagtttgcaattctgagcccagcactttttctctcttactcactttaaaaatccctgtaccttgggatctagatctagaaataccatttgacccagccatcccattactgggtatatacccaaaggattgtaagtcatgctgctataaagacacatggacacctatgtttatagcggcactattcacaatagcaaagacttagaaccaacctaaatgtccaacaatgatagactggattatgaaaatgtggcacatatacaccatggaatactatgcagacataaaaaatgatgagttcatgtcctttgtagggacatggatgaaactggaaaccatcattctcagcaaactatcgcaaggacaaaaaaccaaacaccgcatgttctcactcataggtgggaattgaacaatgagaacacatggacccaggaaggggaacatcacacactggggactgttgtggggtggggggaggggggagggatagcattaggagatatacctaatgctaaatgacgagttaatgggtgcagcacaccagcatggcacgtgtacacatatgtaacaaacctgcacgttgtgcacatgtaccctaaaacttaaagtataataataataaaattagacaaacaaaaaaaatccctgtaccttaatttcagtgttcccaatagcctggagtggagttgtctcctaaatcctgtgtgactgaaaatgaagctagaaagcaattatttttaatttggccaaattttttacatttattatgtgctttaactgtcgttggataagataagctatgcatctttaaagtgccatttgtgtccacaagttacttgtcattcagcaggttcctccacctgccagacctcacagagaacaaggtgatggtagggctagcatgttggtgccagagactggacacaggttcctcaggccagtgcccttctagctggaatgattttggcaggaacgcacatagaaaaaggaattgaggtcttgagttctaaaatagttacagtgtttctataacacatagtctttaatatttaattccatacagcgtttgaattctttagttgagttcttttgagcaaaagaactgatgaatattttataaactaaagtctgctatctgggaagagcactgttagaaatcctcagcataaaccagctcatcttttagtccgagaaagttctgagttagagtagatcataagctctgtgcatagtgcttgtggccagctgattgatcacccagtaccaagggggaaaccctggactggtgtaacaacaaccattataaaaatactgtcagccaggtgtggtggctcatgtctgtaatcgcagaactttgggaggccaaggtgggaggattgcttgagctcaagagtttgagaccagcctgggcaacaaagcaagaccccatctcatttttattaaaaaaaaaaaaatactgtaaagataagtgtgtcatatgaatttctttcatctgggtttaagtttcagcttgtcatttgacatgtagtatcattaagttgtatgctcagcattgtgccgaatgctatgagaaataaaagtaaaaaatttagaagtgcagttgctattctcaccaggcttttgctcttgttgagaagactcggcagaggtgacttaactatggaatagcacaaggtaagaggtaagatggtgtctcttttgtgctaaagaattcaggggtaagaaagatccctatgagtaaggtagtcagggaagcttctagagggtgatgagatgagctagtctaagtaagcctgacacttatattgataagatcggcaaagaagaaaggttatctgggatttgtcctggcaggacaatcaagcattactgagcactggcatgcatgccatggtggtagtgaggggatgtcggaggagtgcagatgcaggtaataagtaggtgcattctatggaagaatttaaaaacaataacgagaccactaaaagtcagtctgccttctgttgtcaccattcctaaggatggcaaagataaaatacaccttaccatggagggaacctgctcccactgcagcatccaccagcaccatggagtgtcagccagtttccagtactgcacagtactaaccttttagaagatatccaaaaacattaagccatggtccttgctccaggtttgcatcctggtttgggaagtgggactaaagggaatctaagcttggagatcataagctggtggcctgcaggcctaccttgggctgcagataggttctctttgtcctgtcagtgggtaggcaaccttttgaattagtcaccacattttaaaaattgggagctgttaaataaaaacaaaacttgcaattataaacttccagcttctcttaaaaactgagaagatctaggttcactgggacacacactcctcagggggagcttttgatggaggcactggccccagctctccacagccccaccccaccagcagccagcatggtctccgttaccttccctgtagtcagctgagtgctccccaggtgagcgatgaaggactgtttcttcctcccttgcctcacccacttacctgctcttcctctgccacctacagcacaaagtcagtctcctgactggtctctgggcctcaggtctctctcctcaccaactccatccttgcaaggctgccaggctaaccctctgaaaaacactgctttcgagaaaccagcaatggctcagaaatccacaagcttattgctgtattctttccagagtttcatattgaatttaattttccattgctatcctactatgaccaacagcaacccctacccagccaaacttgtctcccttgctggtccccacaccactcttaccctgtcatttcccatcacctttgcctgtgtctctccttagtttcaaatgtcatctccccttctctctaaaacctgcctggctcacgttcctcctccttagtgaagcccctgagactccagtgatctctctgtgtctttaccgcttcataattcctgattgtctgatggcctgccctatacctctcaccgttgattacaggctctcttttactactctgaaattggctcaccattggtgggacctcttaagggcagctgttattctggaaattgagtgatgacaagataaaggcttccaggaagaattaggatccagattttgcctaggcaataagaggtattcataggtactataagtcagataggcctgaagtctggaagctttggggcagcagaacccaggagtgaaggacccaactcggggtctgacctacaagaactgagaatccaggcttagagtttagacagaagcctgggaattggcaaggagctggagcaccaacagtgtggataagggtcaggaatagcacttgaatcttgtgtgcctgttattattccttcccagcataaaggtacacttcagagtagggctaagcctgagtctgcagttgtcactcaccctccaatagatggaccacatctccttcatccttatcacatcaggcacatagccatcaactaggtccagtaacttcaccaactgtagtgctatttacaaattagtaccttgcaaattaacatattgctttataagttgctttgtaactaatcttcattttctttttggggtgtgtgttgaatattcccaactacaaatgtgaacagctcctttaaagtagaaacactgttttgtcttctcctatagctttttagaatcatgcatccctcaaaatagtcattttttaaaagatggtaactaatctatttgaaggctactgtgatacaacgacagacctaacctaaaacagtgaccaaatttttagactcttatcacttactcagtagactggatatagataataaaagataaatccctctttccatgccttcctattctgattaagaataaagaaaatttgactgcaataggatctgaatggaaaactaatagtcatttttctacattcagaaatagaggatgtaacctatacttcagccagaagttttcaatttcttagcagtgacaatttaagtaaatttcatacgagttgtggggatctaactttgttatgattgacaatataaaattagccttttctgctgttaagattatctagcatacctgtcattcaggtggaatgtggaacgagattgcccagctgtggatttgaacatcattaaagtcaacaaagggttaaaagttacttcctctgatggatttaaaattgccgcatacacgcaaacaagtttttcaaactgccccattttatgtctttgttgagagacagtatagttgctgcattttaatgtccagattatattacagatatatttcagtaaaccatgaagaaccatcatagattctagaagctggtgatctgtgcttaaataagcatctcctgcagcatcttttttattttataggctctgtaatcacaatggcattctgaaagaagaccttgaagctcacagagcagctgtccttcaccagctcccaggactcctacctgggggtggcagctatgaaaagcaagtcagggcttactggcttgacattgctgtcgtggtgggatggccattcttgtttccgaatgctccaaaatcaaaaagatcacaaagttgcaatcctcttattaattttttattttattttattttattttgagacagagtcttgctctgttgcccaggctggagtgcagtggcgtgatctcagctcactgcaagctccgcctcctgggttcaggccattcttctgcctcagcctctcgagtagctggggctacaggcgcctgccaccatgcccagctaattttttgtatttttagtagagacggggtttcactgtgttagccaggatggtctcgatctcctgacctcgtgatccgcctgcctcggcctcccaaagtgctggaattacaggcatgagccagcgtgccaggccgcaatcctcttattaaaatacatctgcactgtttactagcagagaatagattattactcaggagtggtcagtagatgcatgtctgtgaaagcccctctgaagggaccttgtttggctggctgagtgagtgagtgagtggctttgggtctgcttagcctacaacatagtgctgttctcctcacctgtcatgtgccacttaggctgttttatgttaaagatataaatagggaggatatttacaggattctgcttaaatctagtacacattgattctatcaaagggtggatggaaatcaggataatagtctttaaagggaccctgtcacaagaaaacttcaccggattaagtggctttgttttacattaccttctgcgtctgtactagtaatcttgaagctatgggaaatgctggaaatgaccttcctggtcagtagcttttcaacctaaggcagtaaagggcaatgccagaaaaccctctttcagtttttatcctgcagaataaaaaccacggtcttaaaataatcctttacaacgtagtggaagaagctggtttgggaggagtccttctgcgctctctaggtcatttggtgattgtgtgttagaaggctctttaatctcccgtttctttctcactgccttttatatctgtttgtatactatttggcataaaccacagttgtggtgtatagcatgggaaggatatatgcatttataattctctgcgcaaactgagttgttaaactaaatgattcattttgtgactctcttaatctaggctgcccaactgtgattatgggtgataagccatgatgtctgcacctactagactaacgattgttagagtttctcagcattcataatagagcattgatttccattatgaaaggttgtgttttacatgactattgatctacagttatgtgtaaatcagtcttccataagaaatgatccttctttatgaccaccacaaattttaaaattaatatctggagtcttcaaaactgtttctttaccacagtcattttttagagccagataaagaagtcaagaatgttctctgctgtcagcattatgttctgctacagctagaattgctgtatacattgtgactgggtatgctgtttaacacacactgattatcactggttcactctctagccttgaaaaaagtgccaagtgtttgtgacctttgagagacagcagtcaggtctttaaacacagattcttcctaatggattttagtcaccaggctgccccgctgccctccttgctctagcttcctcttgtgccccttagcacccagaagtccctgctgggaactccaaatctaagtgaaatagacctatctgctttgtgatcatcacctggccagtttgatcaaccattgcagaaacactggtttggagagaatgatttattcttgttctttaatggttaataactctggtgtcatagaattatttttttctttttttaagacagaatcttgctctgtcgcccaggctggagtgctgtggagtgatcttggctcactgcaacctctgcctcctgagctcaagagattcttgtgcctcagcctcctgagtagctgggactacaggtgtgcacttccacaacctgctaattttttgtatttttggcagaagatggggttttaccgtgttggccaggctagtcttgaactcctggcctcaagtgatctgcccacctctgcctcccaaagtgctgggattacaggcatgagccatcacactggcctagtgtcatagaattctaatccaggcaggaaaggctttgactggttacaaaatccttaaaggattgtttggtgtagcagcagctcacatctgtctctttaatcttgatctgtaaaatgagacacctgcccccatagcatactctagagcagcagtccctaacctttttggcaccagggaccagttttgtttaagacagtttttccatggagcgggtttagggaggtgtgggcaggggcatggtttcaggatgattcaagtacattacatttattgtgcactttatttctattattattacattttaatgtataataaaataattatacaattcaccataatggaaaattagtgggagccttgagcttgttttcctgcaactagatggtcccgtttgggagtgatgggagacaatgacagatcatcaggcgttagattctcataaggaacatgcaacctagctcccttgcatgcacagttcacaatagggttcatgctcctataagaatctaatgctccccctgatctgacaggaggcggagctcaggtggagctaatgctccgccctcctgccactcacctcctgctttgtggcccagttcctagcagaccacgtatcagtaccagtccttggcccaggcattgggacccctgctctagaagataatgtgaagatttctgaattcctgctcacaaaataaagcatcttaagagaaaaaaagaacaaaccacgcttgtcatcattattgatttatgttatatcaaggattaagaccttcatatgggccaggtggctaacgcctgtaataccagcactttgggaggctgaggcaggtggattgcttgagctcaggagttcgagaccagcctgggcaacatggcgaaaccccatctctacaaaaaaatacaaaaaaattagcaaagtgtggtggcgcacacctatagtgtcagttaggaggctgaggcaggaggactgcttgagttcaggatgttaaggctgcagtgagctgtgattgtgccactgcactccagcctgggtgacacagcaagatgctgtctcaaaaaaaaataacaaaaagtcatatgcaaagtttactattatcatgtggaagaccaagctattgtttttgacaactatgaattataaaaatatgattcatgtgatttagagaaattgatttaaaaattgctcattattgtcttctggaaaacattttaatataaaaatgattaataagtattttatgagaaacataatgagactatccatttatttttttccaggtgcaactaattctctatattagtggctactttcagatacgtttcccaattgtgttcttatgctcatactgaaaaattgagtcggctttgtattgtttggattatagtatatgaaaatctctattttagtctgcctgtgttcagaattaaattcagggtatttattactctgcatttaaagttaggaaatacggatacatttgtttaaatttcacctttctgattgaaagccctttcaagtacatgaaattaattatagacaattcaaactatattcctttattacatttttaattaaagaattacctgacattaaactttgtttttttatgtgtcatcaatgttataaattttccaacgtaaattagacaaaacagaaaaatctcctttaaatcctttgtaccactttgcacattttctgatgtggtatgtttttgtagagccatgggcgaagctccatttagggaagccatggctgttgcacttcttgcctgatctatcccaaaagaaatctgcaagtcagcttccttttgtgctttaagggttgccttagttgttcagaagtcacaaaccctaggtgctgtacctccttcaacagctcattttccgtttgacttgggcaagtcaattaatcaattttatccttttgtgggaaataaatataataattataggaaaccttagctagtttttcatgctaggacccaaaggatagatgcaattgggtggtgtattagtaacaagagtcttgccttcattttgcttctgcagaaaatcttgtgtattagccaccagagggactgttctttgataatttcactcacttagctatttaactaatttaattcatccaaattaaacttgctttcaagccaaaagcatagttgacttacttattataagaaatgtacctgctgaatgggctagaatttgctgatgactggtcagtgcattttcccagcagggcagtctgttaagaaaccaaatatagatgcaaaggtcaaaacaaaggaattgggtagtttaatgacatcattgcggtacggtggcaaccaagaaaggcaagttgctgaaaggtctttctatcaaactagtcagaggccttagaatcaaaggattccaatgactcatctcactttattcaagtcctggaaaaaaatagggttaggtcaggcacaagtaataacaattaagatttattgaggaaggttctgaactgtacctagacttactttcttttccagagattttattatgaaatttttcaaacatacagaaaagtaaaaggaatcatagggtggacatccatatacacaccgcccagattgtactcctgacattttattgccctctcatatttgtttatccatccttccatcaatcctttatttttatacttttctaagtaagttgcagacactaatatacatttaactttttactttgacatttttaaacattcgaagtctcatatacccactactcagatccaccaactgctcacatttcatcagtcttgttttatctctctccctaacgctttttttcttgagtagtttaaaacagacaacatatcatttcactcacaaatacttatacatctaacatataaggatttaaaatactatcatttaacataatcaacaaaattcttcagtttatctaatacctagtccttgtcagtttgccttgcttatctgaaaaattgtttttctgcgtttgttttgtttgaatcagagttcaaataaggtccacatattacaattggctatgtctctgaaacctcttttaattttgtgacattccctccctcctttttttatgctattgatttgttggaggaattgggtcacttaccctggagaatttacatgctctatttggttggtatgtttaaccagttcctctttactctttattacctgtaaactggtggttagatccaaatatgtgattaagttccaggccagttattttagcaagaaaatgtcatgggtggtgctgatatttaaaaccgggcagcacataatgttttgttaccccatggttagtgatactaagaccgatctgtgggttcaaatgtcgaaaggttgatgacttcaggacagaagtttactattatgtaattttcacaaaattatgaccatttcctagatacatcattaatttggacttacaaaatggtgacttttctaatttgatcatttcttctgcatttattggaagaacttttccttgtcagctacttggtgactctgaaatgtattttttgaccacaaaagcaggataaatgctttattctatttctttatttaccaatttgcagaataatgaattgttgccctaccagcctccaaaggttttaaaatttatttctattttgtctttactgtggtttaaaaaaaaacataaaattagccatcttaaccattttgaactgtgcagttcagtagtgttaaatatctttactttgttgtacaacagatctctggaacattttcatcttacaaaatggaaaatctatacccattaaacaactctccattttcccttccccccaggccccagcacccaccattcaacttctatctttatgaatttgactgttttaggtacctcatttaagtgggatcatacagtatttgtccttttctgactggcttatttcacttagcagcacaatccccttaagagtcatctatgttttttttttttttttttttttttttttgagacggagtctctctctgtcgcccaggctggagtgcagtggcgggatctcggctcactgcaagctccgcctcccaggttcacgccattctcctgcctcagcctcccaagtagctgggactacaggcgcccgccactacgcccggctaattttttgtatttttagtagagacggggtttcaccgttttagccgggatggtctcgatctcctgacctcgtgatccgcccgcctcggcctcccaaagtgcaagattcatctatgttgtagtatgtgacaggatttccttccttttaaggctgaatccaaaggtttatatttttattttttaaattttattaatttatttatttttagatgaactcaaggattttcatgtattccctgtgtttcagtccattgcagtcagtatcctttaggtgcttaaattgtcccatctttgacagtgggagcttcctaagatatcccctccccaccttcagttcttttgatacaactttgagagcttccttactttctggtacaacaagatgtttcaggttcatcttgtgcgtttcctgccccagacctgaatagggcatttctttaatgaactttggttccttttagtacataaataccacagcctgagcagcaatataggcttattttttaactctttcctaatatcttaatttttaaaaaactgtaagtagaccatggtaagagtgtaacaaaacaacaacaacaaaacatctgctgttgagatgaaaatgtgatctttttctcttcactacatgtgggagactgaccatctatgcagtgattcaaaaccattgttgtgctttagaatcactctgtgagccttaaaaatcccactgaccagaccaggcgtggtggctcacccctgtaatctcagcacttcaggaggccgaggcaggtggattatttaagccccagagtttacgaccagcctgggcaacatgatgaaagccagtctcatgatccaatgagactaaataaataaatagattaaaattttaaagtaaaatgtttaaaaagtccactggccaagccataccccagaccatttttcctggactctgtagaggtggccccaggcacccagattgtgcagagctccccaggttgttctgtgtgcagcaaaagttgagaatgctcatttagcaatgaaataaccaaagtttttaaaagtttaaaaaaaaggatacttggactcaaaactcccttagaccagaatatgttgagttccagacttctggataaaccatcttctactaacgtaattgaggcctttaaaaatgtgggaatcttataatattacaaatctatagtgagtgtcctgtttctgttttatagacctggacaaacaccagactcagacgtaccgagggcacaggtgggtcagcatgttgccaccttgaaagaacatgataattctgtcaaagaagaggtaggtagctaaactgtctgaagttttcccaatcacaaatgtggaccacagggtaaggttagtaatttttatttaaaaaaaaaaaaaaaaagttttggccaggcgccgtggctcacgcctgtaatcccagcacttttggatgctgaggcaggtggatcacgcggtcaagagatcgagaccattctggccaacatgatgaaaccccgtctctattaaaagtacaaaaattagctggatgtggtggtgcgcacctgtagtcccagctacttgggaggccgaggcaggagaattgcttgaacccaggatgcagaggttgcagtgagccgagatcacgccactgcactccagcctggtgacaccatctcaaaaaaaaaaaaagtctcaagatgtgcagattattcatttgaggaaatgttatgtatttgaaaaaaataacgataagaaaagtagtaagtgaggttttgtggttggttggtttttaactttctgaccttgggccttttgcataatgttttatgtaggaatttattttccaagaaatttcaaagcatcttataacactctagttttccgtctccactccgtactttagaaatactttatagtcattcatgtcaattcagcaaatgcctatcggtccattactgtacacagatatcagcccagatccgttggagggaaagagacaaataaaatgtgaccccctccttctggggtgtgacatcatgggatgcatgtaataagaaaatgtcaaaaatgtgggctttcaggaaagagagccaagccaagactcctggagaagcaaggaaggcggaggtcatgatggagggagtacagtggcatgagaggtgatctttaaaagataggcttttgatggtacgagttgggggtgggggcagaggtgacaagaaatggctgctatgagccaaagagcacactgggaaacccaacacatgttcaggcaacagagccatcctgaggctgaagcatgggctcaagtctggggatggtgagaaggagcacaagaagtagttgctggccatagtgtgcagcatccgatgccaggccagggagaatgtgtttagttttgtaccttttgaaaagccactggagctttttgaacagagctgtgataggatttctgcagtgccttagggaatttcatgtttggtttgggactgagacattgaaggagggagccctgccctggttcaggcaagaggagggaggggcctgatttgggagctggtgccaagagagaattcgaagatgctaaacagaaaatggaaatggatggagcaagttcccaaggaaatcatgaggggaggaaccggaagcccaactttagagcatgtccattggcatattccttcctcattccctagaaaagccacattcagggaaacagcctttcttctcctaggttgaacatcttgggaatgtgtcttgtttcaaagcatgttttttcatctttatatataatacaggattttctggctttgattctttttaaggtgtttctaaaattattgttaccatgctcatagttcaaggattgtatatctgcaccttctggaatcaagccttgcctgtgtcttgaagtcacatgcccaagtggctgtgccatctagagactctggctttgcccctccagccttccagagcacctttagtcctcctcagacccctctttccttgctgctctaattaagagagtagcaggactttttttttataacatttcaaacatacatatattcagtgataggacggacccactaatcccatgcccacaacccaaattcacatatgttgttaccattgcaccatatttgtttcagaccccctcctcctcatcttcctcctttcccccatcttcgtacccccctcccttccctctccttctttcctccccccacttcacccaccttctctctcttctgctctttctctcttttccctcttctcctcaaacttccttccctcccccctttcccttagagggaagaaataaattattacaaacatagatacagccccccgtatgcctttcacagatttcatgccccttttcaaagataacctagatctattccttctttgctgatgaatgtagatcttttttgtttgttttttcgagacggagtcttgttctgttgctcaggctggagtgcagtggtgcaatctcggctcgctgccaccagggctcactgcctcctgggttcaagcaattctcctgcctcagcctcccaagtagctgggactacaggcatgtgccaccatgcccggctgatttttttgtatttttagtagagacagggtttcaccgtgttggccaggctgatctcaaactcctgacctcgggtgatccgcgcccccatcagcctcccaaagttctgggattgcagatatgagccaccacgcccagccgatgaacgtagatcttaagaaagatactgtttgggttttattgtccctttgagttagcactgtcttgtaacaacattatttcccatgcttgttcactgcaagtacatcacattcaggcattttaagggtgaaataagtgttgatcgactgtcctttgctatctaatatttttttaaatgatattgtttatattagaaaacatggtccaagtcccaaacaaccaatctactcaatttttccaataatgggagggggtgctgtccagctaatatctaatgaatcaaattatattctgtttcccctaatagatctttgttcctttttaaatcattctgatctcattttagtgacaatcataaaaagtaccaatagattaatgacaaaatctatccttaaaaatggaaataggctggacgcggtggcttacgcctgtaatcccagcactttgggaggccgaggtgggcggatcacaaggtcaggagatcgagaccatcttggctaacacggtgaaaccccgtctctactaaaaatacaaaaaattagccgggtgtgctggcgggcgcctgtagtcccagctacttaggaggctgaggcaggagaatggcctgaacccaggaggcggagcttgcggtgaccgagattgcgccactgcactccagcctgggggacagagcgagactccatctcaaaaaaaaaaaaaatggaataaacaggtaatttctcatccagttaggttgtgactgaagaaatgcacagccccaaagaatattaccaaaatgatgcaggcggggcaagccttgtgaactgaaggacaaaatgcttttgtgagtcctagaactgttttggtttgcatgtcatacttttccgattagtgaaatcaagtgtctttgagttgtttctgtgtattgaaaccatctacacatttggtaaatactacgggttaaatctttctctttagataaaatcttcaaagtaagtgattttcaaaatttaaaaaagctctactagaaactacttggttaagagtctaatgaagctcagaaatatttactttgatctcttgggtaaatggctaattaaaaagccgcatgtaaatgatgtttccctgtgagtccctgtgctgtcagcccgagtcaatcccttctcttgagtaaatacatcatcaaagccgcagaaactcagattatgttccctggagaccagataaggtctgcagtgcccacataacctattaggcaattacataattgagctgcctgcttttaaattggaaaaatttgtaattactttttgtggaaaaaaaatgagttgggtgcttcattaaaatacaagatgccttaatattacttttctcccaagtgatacctgtttctgccctggagaactttatcacagcagagcaatatgctggtgacactcatagagtagatcggggtcctgcccccaccatacacacagaccagttttattcaccaggaagatgctttccccaaatgctggactgttttcttgttcttatctcctgaatactcatttgctgggtcatatgaatatcttctcatttaaaaaaaaaattgctacacaggtaaaatcccttcattccctttaacgtagaacttaagtgttgatgcttgcatttctctttaaacaccaagaaattacttccagtgtccaagaggaatactcttgaaccttgaggaagagtcagttaaatctgcatattaggggaaaatatcatctgctgtccacatccattatttttaattctcttgcttttctgtgtctgtgttagtagcactggtttgcatatagaagggaatttaattttatcagatgcatttacattcattttctctctgtattggtaccactgatagcagaaattggatttctttagagcgagcatatgttttcttttaaaaacaagcattaaaaatcttgaaatagtaagataaaaagaaaactggccattttcctactattctactatttatatataaccctgttaacattatggtgtatgtttttttaaatatttaatatattgatatgagaggccgaggttggtggatcacctgaggtcagtagttcaagaccagtctggccaatgtggtaaaaccctgtctttactaaaaatagaaaaattagccaggtgtaatggcatgcacctgtaatcccagctacttgggaggctgaggcacaagaattgcttgaacctgggaggcagaggttgcagtgagcttcgatcgcgccactgcactccagcctgggtgacagagcgagactccgtctttaataataataataatgactaatatattgaaaaacataggttgcattatttgtatacataaatacataaccttgttttttttttacccccatttgctgcaaagtgaactctttcataccattacatgttctatttacatcatttcaaatggctttacagaggtcccctgtccactgtcacttcagtcatttacctgttgttcaacatttgtttctaatttttcctctagtaaaaaagtttcaaagaatatctgtgcaattcagattttacaaatatctgtaatattttcttagaacgaattcctagatatagaattagtaggtcaaaaggtgggtatatctttcaggcttttgctatgcatggccagatctcactctggaagggtcatcagagttaccagtaatggatgaaaataacatttctctgagttctttatgaaactagatactatcagcttttttttttttaggggcagcaatttgagagatgaaaatgacatccaattttttttgttaatttgacctttttattacaattgaggtcaaacttttctctacctatttattagctatttgtatttcttttttcataatttgccagctcatgttctttgctcatttttgtattaggttagtaatattatttcttattgacttgcaaaaactttttaaatataaatttggacattttgttgcaatctttttagcagtttaatttttgtcttttaattttcttaatggtgttttggatacaatgtcttttctattaatgtcttacatctgtctgtttatacatttgaatatcacaaccgtaagtttttggatataatttaagagtcagcttagatgattcttggggttctagatagagcaagattaatatttaaactgaacatggaggaaaattctagtagaactgggctaataaaggaatagtactgtaggtgtaactcatagaacgatttatctgccataatgtctgaaatatggaggtgtcaacatcagtcattccacaaatagtttgtgccctggcatttaatttccaagtcctttctcctggctcctggggaggctgaaaagtgagggggtggtttgttcgtactgacttagccttcagactgctgagaccaatggaacaatctctagttttctcttctggcctccgaaaagagagcctttattaataacaggtaagttgaaacccaagcatagttcaatcataagcactatcagaaagcctgtggtaaaattgttgtctaatggcatttttttcagagaattagctccaatttgcagaacccatttagtcccagcatgagatgtaataaagcaacctgttaactgttctctgagcttctctctgtgttagtgtcatcagtctcagactgcaaactccttcagattggaggtttccttagaaatacacttttctggaacatctgcaaacagtacatcttgagaatgtgttacagacgttttcctgactgcagaagttgtttttgcaaggcacagtggctcacgcctataatcccggcactttgggaggcccaggaacgcagatcacgtgaggacaggagttcgagaccagcctggccaacatggtgaaaccccgtctctactaaaaatacaaaaattagcctggtttggtgacacacgcctgtaatcccagctacttgggaggctgaggcatgagaatcacttgaacctgggaggtggaggttacaatgagccaagatcccgccactgcactccagcttgggcaagagagagagactctgtctcaaaaagaagttgtttttgactagaaatctgtgacctgttcttgtctatccttgtctgagactaacttttgtcttcgtccctgcttatcatctttgagaaattatctgtggaattatcttaaaagatgtgttcttttataaacatttctatcaaaaaagtaacagaaatcctggagataagtattgagtagtgaagataaatgggataaaatacagatagtccctgacttccaacttacaatggttcaacttacaattttttgattttacagtggtgtgaaagtgttaggcattcagtggaaaccatactacaagtagtacagtatccaataaattacatgtgaaaatcaacattttattataaaataggcttagtgttaaatgattttactcatttgtaagctaatgtaagtgttctgagcagtttaaggtaggcaaagcttaactatgatgttcagtaggttaggtgtgttaaatacatttctgacttacaattttttcaatttgtgggtttattggatgtaactcccttcataaattgaaggagcgtctgtgtacaaagtaaattgaactagcagtgcagtatgcccaccacattatttacctcaccgtggaaaagagggctcagtgcagaactgttggcaatggcagtattcttgtcaagcctacaaggactcattagaaaggtgtttgtagtagattccagaagcaggtgcagtgcagtggtctgtgtaggcagttgggatgggggcagtgatgggaaccagccttggcctggccttcaagggcaggaccctacccctagactgcagaaatgggaatactgagcaagtcatcccaacagagttatcacagtggagtgaaatctagggactagtttctagaaatagaggaaaagcccctggtcactagaactgcaccacagaaaggtcctggctgcaaggctaacttgacaccaagttctttggccaaggggactagaactccttaaatcccccaatcagctactccagctcctcaggtaggccatgggtccaggtcagccagtactagggagggaagaaggcaagaactctgcagggaagtcaggactaaaggcagttgccttgaagcgtctgaaatgccaaacatgcaagaccagaccttccatccagaccttctgtccgggccttcttaccgggccttccgtccgggccttccgaccggaccttccatgctctgactctccctgtcggagtgtcttcaccttgtttcatgttaatcacaaggaaggttgttttttccaccttgttcactggatagttacattgttaacacttcactcttggctaatgatgacctgtgaacatttgtccacttctgctctttatattaattttaaactgtcatgtgcattttcccacaattgggttgaacactacccagtatttactgtcattgtcagctacctgtgggtcaccaccaccaccgaggtttcctctccagctacctaaggaaatcgccacctgtcaataggaaatgagagaaacatacactctggcagcgggataatgtgaccaatggttatctactaaaagtttaactcttattaccagcatatttgtatttcttaggggaaagtactgacctgaaaatcaaaagacttggctactaaccccagtcctgtgaattgcccctttttctccacctctaaggttggctctgataaaaacctgtgtcctcctccttgctcaggacacatgaggcatttaagtaagacaatgcctttgaaaaaagataggcagtgtggtgggtgagtttccccagatccccagacgacttacaggcaaagtgcagaccatcttagtacttgattgaagattgggatttagaataagggcagttatctttcttctcagtgcatcctcttcagccacaaatttttctgcaatcttcctgtttaggggaaattcatgggtcatttttaggagggtggggatatggcaaggtcacatctttccggatctttttctcagttgaaagtaattctgtctgacatgcctagaaaataggattcatgtaatcaaagaataaatttttccttcagaaaggaggtctgaggctctaccttttgtatatatcgaagggaggataaacctgcccagattaacagaggtggtcacgtttcatatacatacttaacaagcagaagaatatttctgcattacataagattcagccctcaaaaagtgtattattgtgagggtaacttgtaaagaattagattatagtagaaaataaccaggtgttttttttcttgacattttaatttcatttaaatgtgggaaacagattaaatcctaagtaaagcttaacttaaaattatatttgaaggctatctttgagaccaagaggaatgtggctacagtttgtttttatttctttgtgctttttttgaaacactgtaggcaacagcattattgagaaaagcccttacagaagagtgtggccgtaggtcagctattcacagtagtgaatcatcttgcagcttgccatctattctgaatgacaatagtggaataaaggaagccaaacctgctgtatggctcaacagtgttcctacaagggaacaaggtaactattgttaaagtgtgtgtccacagcaaaaaggcattcagggtcatcatcatctttctcaaggtacacctatagaatatcactgactagtgaatacctctgattttaatatgcataatatagtatttgttttataccaccttccaataaatatatatgttctcctttagtctaacaggaatgggaaatctaactgtaagtctgtagttctagtgaatttatttctaataaaataagtatgaagaagttacgaaatcttaacaaaactaatcgcttggcagtagataattttgatccctcaaagatgaagatgattccataaagtactgtgaagtttttgatatcacctaatagaattttctcataattgtaaacattacttttaattataatagaaccttatcagtgtctaaacagttgattaagaatcaatgaatttatgctccccaaatttaataacccattttgagcacccagaaactgtgattatttaagcattactgctaagacatgccatttaactgctttaatggttttccaagacagctatgaattcctcaggaattgctcgagttgatgtacatgtgcaggatgtgagactcacttattttatgtcccacctaaatttgatagatgtcaggcccagttattttgcgtgaaagcagcatagtggtaccttaattcaattttatttttaaatttttgtctatgagataccttaattttagaataggtttccttttaggaacagtattgtttcagacaagaaatacattaaccaaaaaaaaaaaaagtgaacataaagggaaggacaaacacccaaaggatctattccttaactttgaaatactttttttttattatgcattcaatttttagaagtttcaagtggctgtggagacaagagcaagaaagaaaatgtggctgcagatatcccaatcacaggtaaagctatggttgcctaagagtttcagacacaagatttagcattattatataagcggaacattttgggtcagtggtttgtggaccccactaagagcacatgtattcagctactgcatgctggagcaggagattaatcctaagagcagaacatatatacttatgttaacataaactaaggtggaaaatcaccgtgtctattgaattcttcatcaccatgttatatatttacacctgtaacatcctccatcatgtgccctttcagcacctgcgtctctgtaaaaaggtccatctccctggggaacacccggtcattacacagcaaactatagatgtttctgattttactgttttctttcctgtagtaattgcatatgtatattaaaataagcagataataaaaaaatgtcagataggaagcttgcgtttgcctcagttacaaagcctgtctgataatttaaaaattgtaccaatcgggcttcatcaagacctattaagatttctgcacatgtattaggcttgtttaggtggaatctgaacgatatcattatttttttctttttagaataagaacagcagcaattagtattctgtacagagttctacttgtcatacatctgaatttactagtaccttattttgtgaagtggtgtactacttcattataaattcaaaggtctgactttaaatatttacacaagtaaatacaccattgcaccaaggtactgaggcatgcatctgcatatgtggtagttttgttgtttataagcagaaaagaatggcttgcttttatggcagtgcagttcctggcatgattaattttttaaactcatgtttctgtgatgaactctggttttgaaaaagcagtttatggtagagcagttattgtatatattatgcattcagataatatttcactctaaaatgcagagtttttttattttaaacattttcaccaatgatatgtttattgtgtttttagtctgcattttctgcaaactctggtatggctccctgctatttttattaatagaaatgtagatgatcccaaactacagataaccatgaagtcatttggatacttttctcttgcatttacttttggatgcagaagtatctaatggcctctgaatttatttcaattaaaattacaaaggattattgaggagaaaccaggaaatgaccttgttcattcattcttctcttttcagtattctttacaatcatcccttgctgggagtagttgactctccccaaagttaatgcaaatgtattttctcatatactttctttataagaaaacggataattaagtaccagggtttcaaatcccttctcatgcagaagtgcaatatggctagaagcaacttgggctgtttgccattaagattttaaaagaaattgtaattccagcaacctgccattgatccatcaatagttggcagttaaaaaaaatgccttgtgccagaatattagacattaaaaaaagtactttggaaattttttaaaaacttagcaaagccatacacattgttaaggtgttactgttctgtccttgccagtgtactatccccacccagggacctcccatgaaattcatgtttgagagcttcacgcaccttggcactactaatactgttgctttgtccatcattgcagctactttgatctctaagttcttgaccatcatccctttattaaatgtttgtgactttggcataactatttggagatttcacttttggtagagtaaagcaagtatgtagtttaatttaagacagagtctgtctgcctctttataatagttctgttggggtgtcctgtttgtgtgggtgcatgctggttgtgtttgtgtgggctgcattccttctagaatattccaaagaaaatattccagaggctgtcccctgaaggttgaggaaatgtagcagttgggctggggctttgcaaccagccatcagtgtcagctcttttactccttgctctgtttctctaccctctctgagcctctgtattgggaaagcagacatactgcccaataggattgtcttaaagtttaaatgaaatcatttgtgaaagtgccaagcagatactagacactcaattttatctgtgaagtataataatattcatgtgaacattattagtgttcctggtcttctgtgtgggcccccacagtccccagcatttccaaaccagctatgaggagcctcacaaagcaaactcaaagaagaacataagtagagagaatgaggatgcagcatcacagaaagtgccattgtgagacgagcccctggaagagtggacactttcagtctgttctggtggacctgcataccttccttgagttgtggtggccacttgggaccaagacccacacaagcacagtactgctgcaatacctgcaagacagtgcttcccaatagtactgctatgttagtttctgcaagaaattgccacttgagaacacaattgagattcaaatccaggatagttaccttatcaaaaaggaatctcaagaagagtttgatgatacttttccaatttccacttagtcccatgaggacatccacagagaaaaatccgaaacagctgctgaagtactcctgaagatctcattggtcaaggcccagacatctctgtctcggggtgcctatgtgcccttagtaaccctatgtgctcacaatggatgatgttgcagggtacctgattaccaggcagcagacctcccctgatgtgtgtgctgccccacaagtattgatgagctaatgcagcattttccaaaatgtgttatttgcaatgctccacccagaaaatacatcaattaatacatattttgttgcccagccctgtgtgatccttctctctctctgcagtatgcataatgcatagaagcatagtgaagacttggaaaagactttcagcaaaggaattgtttaaaaatgtgagcctagagtttcagataacttatcatttatttgaaaatggaattctttctgttaatagccaacagaattaatgttctgtggaacatactttgtgaaacatacacacatgtatgtggaacacttttaaagcagtgagtccaatgtgggcaccagtttcctcaatatgctaaaattatcttcagcatttttctgtgatttcattttgtggggagctcccttgtgcgtgagattgctttataatgagattttgggctaccttagtgtaactacacccagatgttatgactgacagctgcttgttacagctgttccttgaattgacagtaaggttacaatagtaattttaggcgcccagaagtgctattcttcagtgtgggatccttctgtgcgtctttatttgcttttcagccatttcagaagaagtataagagaagacgtggctgaggtgaaatctgggaagtcacaagaggttgggggtgggaagctgtgaagtcatacctttatcagaatgagggggtcctggggatgtttaacctgagaagggcacagtagctctttaaatatttgaggagctgccatataccaggtagaatatttatcgagcttaattatagagcgtagctcagtaacaaaacaactttctagctcttcatttcagcaaaaccaagttcagtatcttccaggggtgagtgcttgaaccatggcaggaaccatgactttttttttttcttttgaaacagggtcagggtcttgctctgtcacccaggctggagtgcattgttgtgatcacagctttttgcagcctctatctcctgggctcaagtgatcttccttcctcagcctcccaagtagctgggactacaggcatgcaccaccatgcctggctaatttttgtatttgttatagagatggggtttcaccatgttgcccaggctggtctccaactcccgacctcaagcagtctgcccactttggcctcccagagttctgggattataggcatgagccaccttgcctggccctgtggctctttaaaagagcattgtggaaggaattattgcttctgtgacccctgacattccttctaatgccaagggactgtgcttcttcctctatgctaatggaatccagtgtgccagcattctcatctcttcatttccctttctcatttgcttatcaccacaaaacggaggtcttcttggctggggctcctccttaaagagtctgctatcactttgaaggcatctgctttgctaatcgttattatggagcatgcgagttttctgtgtttagatttacatagaaaccctcctgggcacacactgatgccccacccacaaacacagagtcagtattccatagcctgtatgatctgttgttgtgaatataatctaccccttttattagtctagttgttgttcactaaagaatccaggtggaaatcaaagatgaatttttatatctataaatgtatggttttctgtatataataagtagtatataattagatgtattgatacaatatatattagttatatattatatatcatatatcattatagatgattatatataaaatccttaattatattagttaataaaattaatatttttacgtgggctgaatcctgggataccagaaaccacaaaagatggtatccctgccctcactaagcctccctcatctctaacctttacaacagtcctatagggtaaacattagtactcaccctacaagtggtcagacagaaacttagaaaggtatcctgctcaaggccatgtagctggtgtgtttgatcttgaattgaactcagactttaggatttgggctcttgaactccttccatttcactgccctgcctcttttatttattttgtttttttattatttatttatttatttttgagacagagtctcactccatcacccaggctggagtgcggtggcacgatcttggctcagtgcaacctctgcctcccgggttcaagcgattctcgtgccacagcctcctgagtagctgggattacaggcatgttccaccaagcctggctaattttgtattcttaatagagacggttttgccccgtttgccaggctgtactcgcatcctggcctaaagatacccacccaccttggcctcccaaagtgctgggattacaggcgtgagccgccacgcccggcctaccctgccttttttattttaccaaaaagacaactgcatcaggatgtccggatcaattaaacatcagtgtacatcataacagaagatgggctttgcaaggctgcttctgagagcaatgataaacaaagcttgcctttcctttctcttgggttaggcctggagaggtgggcagcatgcaaggattttcaaatgcagctcatcccgagaggcaggccttttataaagtggggcaaacctgagcccagctgggctgctgggaggtcggtttccctgaaacacttcctgacctactatgtaggtcagtttgcctgaaacactcaggccatgaggaaagtgatgcttatctagattgggagagaaagtctgccttttgaactacttacatccgcaaagtgaaaatttcccacattgacaattttatttgtattcacactaaatttacctttcagcattaagtgagttttagctttagcagatgatgcagctatgctaaatgtcataaaaatacagcacctagcacagtatctggcacagagtgggcacttaatttgtcaaatgaataaaaatggggatattaaggaattttcttaaatgcttgatgattcaggatagaatactatctctttcagtcatgcactccaccaatacttttcccaccccacgtgcccatcctggcaaaactagtctccttaagctccatgtgaaaagggctctcagcttttatctcaagaggattaagcctctaagaatgtccattcagactctcattcttttgacaccaattctcttggtcaagctgtgttgaaagtggttgcctgactgtgccattcctcgtggatattctttggcaagctgaaatatgcagggtaatactaagacatccatttagagtctttccaggaggtcagtatagatttggagggtgccacttggagttctaggcagtgcttcccaaaacatgattgcttgagttttacatcaatttggaaaagggctggaaagatatagtggctaggttgtcactggtgactggatttatcctgggaggaaagactgtagtgatgactttgggctcccaaagcacagtggcataacaccactagtactgaggttttaccgagaatgtgcttcacctgtcctatcccaaagcattttcctgacaagactcagtcaagacatattacctgttgtgcctggaacgggaaacccccagcttgtgcaaaaccaggggaaccactgtgtgttgctggattgtccattgaaagtccacgtggccctgtctctgtgccaggggtcagcctgctggggcttcacccatggagcctgctgcctgctacttgcggtagcaaaacagtcctcattatattgcagggcagtgctgtttatttaacatggtcattaaaggataaaaggtacttttctgaagggtcttctggactggatgcttctatattcagagagatgaactcataaatgccaagagaaattctccccagcggttcatggtagaatcccatgtagagttttagaacatacccatgccccagccacacccttgtgcaattatttctgaacctctgggagtggcacccaggcataagtactttataacacatccagataacttcttaggtttgagaactgtggagcaggggtctcagttcaaaagagcccttgtaggtcctgttttgaagcaccctcattttacacaggagactcagagacaaaatcaggctttaaatattttaataaaatgaggggttggagtgtattattttcctagggctgttgtaacaaagtatcacaaacttaaaacaacagaaatgcattctctcacagttctgagagctagaagtctgaaatccaggcgtcagcagggcccttgcctctgaaggtgctagccagtggctcctggcttgtgggagtataagccctgtctctgcctctgtcttcacttggccttctcttctgtgtctctgtgtctgctcttcttcttagaagaacatcagaaattggatttaggggccactgtaaatgcagaatgatttcatctagggaaccttaactaatatatctgtaaagaacctatttccaaataaggtcacgttctgaggttctgggaggacatgagtttgtcgggttgaggggaacaacattattcaaccaactacagggaatgaggaaggacttcttcatattttacatttttagcatccagttcatcttctacagtaattattcctgaacctactataaataatggtaaagataagattgccatttctaatttctctcattaaataaatcattgagtacaaatggctaaaatatactgttttttaaaaagctatttaaatcaataaaatacagctttctgatgaagattactcaagttttgaaaagttaaaggtttcctgaggttgagagttgaaaatccacctctcacgactgaacagtgttaaatggcaagacgcaaaagtgtttcagctcgttttgggaatgttggttaaaggtcagtttcaagcctggaatttgttttcaggtttaattgttgagttgccccatagaagttaagactatgatataaatttctattttctgaagcagccccagacaactcatctgaattaggcgggtctcttctcgtgcatcagccgtcttcctgagagtgcagagagcaaccttgacaatggaatttgcaggcccaggtctacaggtggagtggagtttattgcagaaagtctggatgtgaaaagtgattctggttacggacccaaacttgtgtatcttcctgcctttttaaaaaaaaattcctaaatatatttgatgacttttctgtattttcagaattgcaaaagcagccatatcctattttctctctctctcttttttttttttttttttttcagagatggagtcttgctctctcacccaggctggagtgcagtgatgtgatctcggctaactgcagtctccacttcccaggttcaagtgattctcatgcctcagcctcctgagtagctaggattacaggcgcccgccaccatgcccagctaatttttgtatttttgtatttatagtagagacggggtttcaccatgttggtcaggctggtcttgaactcctgacctcaagtgatccacccaccttagcctcccagagtgctgggattacaggcgtgagccactgcacccggccttatttccttattttttatttatttatttttttgagatggagttttattcttgttgcccaggctggagtgcaatggcgcgatctcgggtcaccgcaacctccgcctcccaggttcaagcagttctcctgcctcaacctcccgtgtagctgggactacaggcacgcgccaccatgcagtggtgcagataacagcgtttctccattttggtcaggctggtcttgaactcccgacctcaggtgatctgcccgcctcagcctccctaagtgctgggattacaggcttgagccaccccgcccggcccttatttttatttaagcagattactaggcaaatgatttctggattctcagtgataatatttatcttttgaagtaacttaagaaatatatctcacaatttttattttattttgcaaaaatgaccaagtttgcagtgtcagcaacacacctagtacaatttgaaaaagcacttaggtgtagaaatatgtgaaaagtaacaatgctgagaaattcagtggacagagaatatttttcagatttcattttaacttcatatagaaatagcagttatccttccttactcaaacatacccagttctctgttggttcaaggtcggttttttagctgtagtgatagtattgtttgcatctccctttgttgtttttttctgagcccaactcttctttttttcattaaggatttctgcaaaagcaatgggcagattccctgcctccaagacaccccttagagactggtgaaccacgtgtttgtctggctcttgtaatggggtgttaaaagcacttgttcatcagatattttctttttatttgtagatttagaagtattttagcaggtgtacatttgcatataaaagagaaaaaagataagaagttgaggctttttctttctcctctccttaacatcatctctctcccacctctttattcagcatgttttcactttctttctgtagctgtttctattttctatacacaaaacgcatatcaaaaagaaaaaaaaacagtctcagcaatccttcagcactttgcagaaagatagatgattgggttcaggcagcttatgtaacaaagtaagggaaaatacatttatctcatgtcatcagtcaggagtgaatagacaaggatagattttcaccttctggagctgtagactgcatgagatggccccccttgccttgccttacattttaaactacaatattttctactttttaaactaaatcttgacgcagatttgagtatataatcaatgcttgaacgaaagattcagaaccgaaaccttgagcatgcgtgtgtgtttgtttctgtgtgtatcagaacattccaaccgaaaatgattgtattctttagaaatgcttgttttatctaaacattttcactactcagtattttctgagagtttaactttactaatggggggaagtgtttccctggatttctaagtcaggctagaaagtgaaacctttaaagcaaccacccaatcctcaaattttcagacttacagtttacttgcagctgagaaaactaaattcttttcaccttggaaatatatcgactttgtccctaccttgtttgtaacagactaacttgaacttctagagtcattacttttgctcctttatttgttcattcatttaataactatgaatttgcagagcagcaacaaagtggagcttttaactgattggttcatcactgtctttcttccttctaaaaaaatcctgggcctgaattgccacacacctcatgtccataactttacactcttgcttcatgaaactagcatcctggccaagtcttctgggctgtttcaggaggatgtctgatttgtttgagaactcctagaaaaagtacactcttgcctccagtctgaaacctggtctgtttgatacagacagccccttaaaaatcttcatacagctgatgcatcctccctgggtaacatgttccaacaaccctttcaacaagaaagcttttcctaacatctagcttgtattctttggctgcagtttttccctaagtgttcttgtaccactttcagtgaacacaaaaagttgctcactaccatctagtttggaggctacaaatatgttctgttttgtctgtgcagtgttttatttttaaaaagaagaaagaaaaggcagaagtctggcaagaccaggaccactttcccaccaggcagcaattggctgaagccaaggagcagctgtgctctatagacaagtcatgtgcctccttgcctgctacagggcaggcccttcctgctgctcctgcctggccatagtcacttattggaggtacttgcttggttggccctagaggcatctggatccacaatgcccaccctgtccagtctgtttgcaatatctgaactttccttcccttctccaaccttgttctatgcagactatgtattctttaatcacttctaatttgttttagccaacccttattaattttgtttttcctgtgtagatcatctctcagtctttcataaatagtttgtgcaacaattctgactaaataggggggtgatgcatagggagagcgactccatctcccatgcatctgatccacagttgggcggcagcagtgctaggcgctctgccctctcccgcaactttgacgtctgtggtcctgcctcagtgagtgtcattcctctgggtgaatgcacttcatctttgtaccttttaaacttcactttgcctttagaccattggagggaatcacactgggattgggggtgagtgatgtgcccagcagtcctcagcctgatctcgccagccctttaggactcaggtcagggcagctgcatcccaaataaaaactgcccaggtgggcctcggtgactctccttggagaagggccacagaggcttaaggatgaaacaccagtgaggtgattgggaagtggtgggctctggttgcgtggggcaggagagtgagccatctcaggatgggtggttagccaaaagctcctgagcccacactcttcaggaaggaagggagggggaccagaatggaaagtgtggagcatagaaagggctcatcttttccagagtatcaaaatggtcccttgttgctagaagtgatctcacttcacattggtaatttcctcccttgctaacttcaaaccagtaatactatcagcccttctcctgtttgggcagaatgcttaatcccccccaaatctgaaattacctcaggactactagcttgatatttctcacagaaatccccttctgattgccagtgacacgttttcctggtttctgagaagcaggagagccgtctcactggagtcaagtgatttaccttcagacaatggagaaatgaatttgcagcatgccgctccagcttccagtggccaggaggctttgtttatcaagaagctgctccttttttttcaaatttccatctttgctatcttttccttgacgaaataagtttaattgaatgtagaaataacgtggtcattaagatctggacttgtatcttgagagctgaaaaactttttggttgatttttataaaataaaaacaaaacagggcatttttacctcttttacactgactccttacctttagaattcagacactctgtctttgattttattaatattatccctctttcacagttaccttacagtatatttgaagtaacatggatgttaggattagccggaggtcatcacaacaccatcccattggagccatcctaggacaatgcgaccagcctcatcaggaaacactttcgtcccagcgacccccacacatacacacattacacaaaacagtactttcccctctgtatgcactgtgtctgatgttttctttatcagatttttcaaaatactagtttcagcgacctaaactgatttcacaatccagcaatgttaaaaaagtgttgccttagaatttattatattcagagcaaagaatccctgatctgtatatattttaattatatactatttaatattccaaagtataatgttcattttaaatactcatttttatcttgactgattttcagtagggcaaggtaagttgtatttttattcttcagtgtgatggtagttttaatccagtaatagggtctcatggttaagttcttaaatgaagccagcaaaagcaggaatccaacctgttgccagcccctagcattgacagtgggactccttttgtgttacattgaagatgcagacatggatgctgttttgttatgtctgtgctgaaactctgattcttcatcctgcatttcatctgggtgcccttgaaacttagagtaatggggaaggttgtgtcactcaggttctttacgtatttttgtttactgtttttcccaacagtcttccccaatttcacttatagcagatgccattagaagccctgcatggccaagagcatcctatgaacatgagcaggtgcaggctgccactgatccctgtggacacctggctttgctctctacaaacccgttctcgctccttccccatggcaagacttggttagatttcctcagctttgggactctgagctcatccagctgtcaccacccttcctgaccctctccccattcccccagccctgtcccagagcccctgcacttgagtgtgagagcccaagagccagagcaaagagagtttctaagtgacctgaccacctaggaagacttgctttctcttctggttcattcccgtagctgtctctacaaggccccgagggaagtgaaactgttttgctgtgatggggaacctatccacagacccactcaaaataatgactgtgatttggctgcctcaaataaactcatacagcttgtctttgagtcttgaaacccgggttcaactaaattgttttttgtttgttttcagaatgtctaaaaagtgacagttcaaaaaataataatttgcatgcatttaagaagtgttaatctcataggaagaatttaaaaagcttctttctggccagtaaaaaatgtaatatttctgtgtttttctttaatcaacagaaacagaagcctatcagttgctgaagaaggccacccttcaggataatacaaatcaaactgaaaacaggtttcaaaagacagatgcttctgtgtcacacttgtcaggtaagtaagagcagatggcagtgtccaggggcccagagtggcaggcagggctgtgttcggggaagggtggttattctttatgaaggtttctggagtttgctctgtaacgagctgtcaccaggacagaatgagctagtacttttttatccttagcaaatggacatgtggaaaagcccttttgttgtgtcctagacatgtgctggccagcatggcaatggcccttccaggccctggattctgccaagcatgtcatgatagtgacttgtcaccagtgaccctgagaagacacacccaaattccttctcttccccacagctactagtgtcttagtcattcagtgggcagtgttgtactgggctgctttccctcaccagaatgttgggggattttgagttcttttactgaaaggattataaatcccaggaatgctaaattttattattttattttattttattttatttcattttattttattgtgagacagggtcttgctctgtctcccaggctggagtgcaatggcatgatggcttactgaagcctcaacctaccaatctcaagcaatcttccctcctcagcctcccaagtagctgggactacaggtgcgcaccaccacactcggctaatttttgtatttttttgtagaggtagggttttgccatgttgctcaggctggtctcaaactcctggactcaagcgatccacctgccttggtctcccaaagtgttgggattacaggtgtgagccaccatgcccagtgaggaaagctaaattttaagcttaattatagttccttcaatttaagattttgttttaattgtaatttttttatactttgttatttgtatgtctattattttcagtggttttcctttcattacaccagtttttagagtataagttacctcagtttcctttgtgagagtaaatggattaatacagaaggaaatccacattaatgactttcttagccaccatgccataatttcatctagcagaatgaacagtgatttctaaatagcatgtaattcccagtccatattcagatttcccagttgtctcaaggatgtcttcttcaaccaggcacagtggctcatgcctgtaatcccagcattttgggaggccaaggtgagagagctgcttgaggccaggagtgcgagaccagcctgggcaatatagcaagacactgtttttacaaaaaatttaaaaattagccacacgtgttagcatcttcctatactaccagctatttaagaggctaaggtgggaggatcacttgagcccagaagtttgaggctgcagcaagctatgatcacaccactgcactgggcaacagagcaagaccctatctaaaaaggaaaacaaaaaatgtctttttcagacagatattttcaagggacatacttacagtacatcagacttagctgtgtttggagagctgattcctagataatattagtggttaaagtcagttgcggcaaaattcagttattttggtggtattgaggatttggtgaccaatgcacattaagtgcccagcacagtgcctaatagtgaaaagccccctgggagagccggccattgtggtgttagtggtgatttgaactcagcaaacataagacattgtagtttattgagttataaaacagggcctctgtcctgatggaggttgtcgtcacttgcaaactcttaactgtttgctttccatgaccttcttcacatttgagtcatggaatttgaatccagagggatattagaaagaatgtattcaacactcccattttacaaatgaggccccaggagagtaacaccgtgctcagagcctttcagctggatagctgacacacacactttggcaagtgactccacacgtctgtttctggtaagtgttattttcagtagttaattggacaaatgcaaaagatgagtaaatttggctgggcactgtggctcacacctgtaatcccagcactttgggaagccaagggaggcggatcacctgaggtcaggagtttaagaccagcctggccaacatggtgaaatcctgtctactaaaaatacaaaaattagccagacatggtgacaggcgcctcagctactcaggaggctgaggcaggagaatggcttgaacccaggaggcagaggttgcagtgagctgagatcacaccactgcactccagcctgggtgacagggccagaccctgtctcaaaaaacaaacaaacaaaaagatgagtaaatttgacatataagttctagtcccttcgatgtgtatcagaaattatggattatggtactattaataaccttgtacttaatgcatttttattaatttattcataagtgaaatgacactctaggttgtgtagtcaagcacccctaaattcatttcccttgccccatactcaaaattacactacatgttttgcaagattccaaattttctggcagtagaatcatggaagtgctcctgcctatgtttgctgtcactgtcattgtagtcagatcctttggctgtgttttgtcttttacccttactctcattctgatcctaaggacttatctgagccccaaagaaaagcagaaagtgggctgggagggtgtagggcagcttcacagtgttgttagaagtagcagggatgggaggtggtggtgtactctgcactcaagaagcccaccccacatctaactaatgaagaagcagtgcatgtttcacttacttctgagtctttggacctgaaggaaagccacttaaataaaccttgaggcttagttttcatgtctgaaaagacctcctcctggtaagcatgtggacaccctctttgggctgaatgtggacacatttttaaaataatcactttgctgcagagtgtacatgcaagcaggcaggttacaggttagaaactcagcaaatgctttttgcaaagatgcccatgcatgctgtatctgtgattttgactgccagttaagaagcagacctgtagcagaaacatccaaggctgagaactcccaagaggcaaagatcagggattgccctgcaaactgggggcattgtgggaatatccaagtctctggctccaaagaaagaggtggagtgtgcatcctcctcctcaacctttagaggctggtaaagagtggccttgatgattttcagtggagattctttctcctctgtgggatggaaaatagaggattttacagaggggcttaagagtggataaggtgggtgactgttatccatgggtctcaattatttctgagccctggtttgctgcccgtgtgttataacaatgggaattatccagtgctttgtgacacagtagagatccatatgcctacatgtgcatcttagtcatttaaaattgaactctttggatgatttcagttttcactttttgtggcttgtgtttcggtatcacaggaaagtgcctcactccctttcggtattctaccagcatttcattctctgcctcagaagctcccttgccttctgtggcttgaacagcatcttcctctgttggcgtttgtttcaccaaacttactgtgaggccactttattcattttgtcccatggctgcatgacagctaaccctcactctccatgtttacgcttatcacaggtttgaatattggcagcggtgcattcgagacaaagacagctaacaaaattgcttcggaagctagtttttcatctagtgaaggaagtcctttgtcaaggtaaagttgtgaaagcctttctgaatagcagcaacaagatgagaaatgtcacagcgcaatgaattaaactctggctgcgtattattttgttgtatgacttggagggttatggtttgggtttttgtttatctaaaataacagttgaaactttagtctacctttgaaaatatttgcaccagagccaagtattgttttgcagctgttgtttccttggtttaagactcaattgacacctcagtgaaccacaaattagcgtctacagctgctcgcagtaggactgcttagagaccacacaatggaggttgtcagaaaaagggcagagagaaaacatcaggccttaaaagaaataaagtggcatgtttcttctttttgtgatggctaatatataaactagtaattgctggatattcatttttattttcctctttttttttaaccaagtgtttaggctaggttattctttccttttctaatactttcttgcttattttccataaagaacaaaatttatcttttcacatttgtcaaactgtagcactcgcttcttgtaggttttttgagctgtgataagagagttgtgtgctgaatttgtcattaacataaaatactaatcacagtagcttcaggtcacttagaatttatagatgggaatataagccatcacctgatgaaataccctactcttttgctttgagctaaatattgtttaaaatggcatagcaactttccttttggaacagcattgctcagtaaaaaggtgtccttcagatgattatattacatttgaattaactgcttgtctctgatgaaattttagaacaggaactttacatttctagtataacatataatgttccataagagaaaatgatttgaaccagaaatgctgaattttttaaatgaaaaaaatcctatttttattcatattttataaacaatacaatgtttttagaacctggagtatattaaaatgagattgaatttctaaaattataagttttagaaacttgacaagttaagttttagagaaataactcatttaattttcagaagttattatttttaatgcctgagttttcgtccatatttttgaaggaagtgggaggtaaatgggacaggaagagtgttaaagtattatgttattatgattgtattataaattcaagttctaggtctcctaaaagaaagtttaaaagacagtaaattctacagataattttcagggccgaatgttaccatttggcttaataatatatagaggcactaaaaaactcacttcttcctaaacagtctttacgtaggttctttgggaaatttttaaagacattgagaaagcaattggattttgtaaaacatttctcagtctaataatttcacatcttgtctatattttactaaactaaaatcaagcattttcctccttcaaattgagacagaggtattttgttattagtatcgtttccgtatgaaattaatttcctaataaattacaagtaatctcatcatcccctttaagaaaacaaaaaaaaaaaccacacaaaaaggccttgaaggaactcttggttctaggcacttgataataatccagtgatgaaaaggtctgggtccagagtgcgtgggtttggcgtgctgtttgtcacggtttggttcttgtgctgggcttggtgttgttcatatgccaccctgggctttggagagctccagttttgctgtttgtgctggattcactgaaatttcttagaggcttacatttaaggatcccacttactgcagtcactccttgtgctttattgcttttacaagtggtctcgaaacccggtacttgagaataaacataacagtgcagtgctgctgtagcacttttaaaattcttctttgctctattttgtcagtgagctgatgagcaacctcaaaaaaagaaaaaaaaaaaacccactggacctaaaaaaaaaaaaaaaaaaaaatggcttcctctgatgtcctagagacaataattatgatgtgctagttaagcccaaactacagctgagggattttactttaaagcagcggcttgggcgcaaaaatgcatttatagctctttgtctgcacctcattatgtgtgggcctgattcattaagtaattggtttgcagttgtttacatgagtattaaggccttcttttcagccgcctttgagagatacattgtgcaaatgttgcctgtgatgaatgcagaatgagggccagagggtccgtcctattggctaaacagtgcactcctgttgaaaagccagagaaagggattgggtgctgctttgcatagcaatgactttcttaataagcgttacagattaatacacacaagctataaaagatgcaaagagatactcttagcacatttatacatgctcatttcattgtgatggtggtggggttcgggtgctttcatattccgtttttcagagcagcagcttcagtgcatgagccgtaatagaatccgatgtttattgtattataaatcacgggcaagtaggcagattggcaacagtttattattaaagattctttcagtgtaaatctttttctaccattgtatttgcttcagcaaaatcattttgtggttgagtggggatgaaaagcataatgtacgaaggagtgagtcctaataggaagccgttctccaagtaaagaccacttgttcccttttgttcaggggtgcatgccagagcttcctctcctctgcaaacattgtctcgctttaccttccccagcaagcggttttcactctcccggatccatttgttcaatggagagtatattttaaaagcctgcccttagcttactggttcctgccttgtaacttcagcttactggttggaccagataatgttttaccaaaaggaaagggtgtgtgcttgcaacataattgcctgggggaaaggtagcagaagtcaccccgccactgtaccctggcagggccaccgtgggtggcattctgtgccagccttgcagccaccagagcggccagtggagggcgccagcctgcagctgatgctctgatggcggtggcattttctgtctttgcctggtcactgtgccattttccccaggataacataaagattataaggaaccaatagtccagtgaaataaaaatgagtttttcctgaaagtcctttaggttcttatataaaagcactcttctctgtcttgggtttggcacatctccattcttaaattccactgaattagcagcttcctaaatatgtcacgtttcttatcacaagcctacatacgttgttttttctgcacaaagcaaataagaacaatcgcttgattatttgaagagaaaaagttaagttgacctcaggcagctgaaagtggcatcttctgtaggaaccccgattaaccatcagggggcgctcagactttgttaaattactggtaggcctttaaaacctaaaattagtgtttacagagatttgttggcatagtcattgggatttttttctttctggattattttttgccttctgtttttcagaaacatatgtctgttttgaggaacgttcaagctgaaattgctcctttagaaattgtaatactgatttccactagcagtcaaaaattattacaaattttagaatttggagtctaaagactatgtcttataataaattagctattttcagccttctaataagactccagaactggaaggatacttcctgctgccgggagccattcctccttatcctggacatcatagacagtgctcctggcaggaccctctgagtctcattgccacactcaattggtgaggcctcagagtcacaataacttgggtatatttgttaatgggccatggctattttttctttttttaaaaaaatgatatgacaggccaggcgcagtggctcatgcctgtaatcccagcactttgggaggccgaggcaggcagatcacttgaggtcaggagttcaagaccagcctggccaacatggtgaatatccctatctttactaaaaatacaaaaaaaattagccaggtgtggtggtgtgcacctgtaatcccagctacttgggaggatgaggcaggagaatcgcataaacctgggaggcagaacttgcagtgagctgaaattgcaccaatgcactcatctgggcaatggagcaagactctgtttaaaaaaaaaaaaaaaaaaatgatggctgggtgcggtggctcacacctgtaatcccagtactttgggaggccaaggtgggtggaccgcctgcagtcaggagttcgagaccagcatggccaacatggcaaaaccctatctctattaaaagtacaaaaattagctagacatggtggcaggcgcctataatcccagccactcgggaggctgaggcaggagaatcgtttgaacccaggaggcagaggttgcagtgcatcgagatcgtgccactacactccagcctgggtgacagaacaaaactccgtctcaaaaaaaaaaaaaaaaaaaaatagatattgaccatgaaatcgagtcaatgtgttactaacattaggttttccctctgttctttcctccaaattccaccccctgctcccgccctgggccaggaatgagtatctgacacccacctctgctgccacacacctctcaggagacccttgttgcctgcacctctgtcaagcacgggtagtctgcacactgcacacccttcccagccagctccccttgtccccctgctgaagaacagttaacaaccagaccgcatgtcatgcccgcgtatgacccactatttcatgtccctggattttattggaatgctcttgccccactcttttacctggttaaggccttctagatttttcaaggcttaaccttctgaacgtttcctaagcggagacctggctgcacagcatgcccttcctgtggtccccctagctatttctgttatcatctgtagtcagggctagaagccatttcccagtaccctccctcccgcagtggggcaggcttcgtttcatttatttatttatttagagacagggtctcgctctgtcacccaggctggagtacagtgacacgatctccgctcactgcaacctttgcctcccaggctcaagcaaccctcccacctcagcctcccaagtagctgagaccacaggcacatgccaccatgcctggctaattttttgtggttttggtagagatgatgtttcgccatgttgcccaggctggtcttgaactcctgagctcaggtgatccactctcctcggcctcccaaagtgctgggattataggcgagccaccatgcccagcggcaggtttcttaatcaccagtgctggatagtcattgtgcttcctgagtgagtaagcatggatatatagctccaccattcactctagtttgttttttttttttttaaataaaagtcagtttgtacaagttccctcacttctgtatggcatcatgtacttgagctgcagggaatcatgcatttcgtacagttatctgcataagggtgtgagagagagagagagagagtgtgtgtgtgtgtgagagggtgtgagtgtgtgagagagtgtgtgtgtgtgtgaatgtgtgtgtggacacatacattttcaaagggagactggtaatgactgtgaatatgccctctgctcatgcatccccagtttcaggaagcaggacctgggtgaacacacttgcagagagcctcactggggttctttcctggctgctgtcttgtctgctgatggaaaggtgtctggcttcgggccctgaccttgatgagagctcttggcacatgctggaggcctggaatgtcatcccacagttccactgtcatcagttctcagccaaccccactgttgccttttcagccaatttcatggtgtttattctggtgtcagtctcctcaccggagcgtgggcacctcaagggcatcgagcgagtctgtcttgtttgctgctgcagccccagcacagagtccgatgccttgctctgcccctgctcttggaaggcctggctgaggcagtttccctgtctcttcccatttcaagggcacccactcatcaggttcctcgaggaagaaacttcacgcatctcaggcctgccttccctccatctgtccccaaacctcccattccttgacccctgtgcctaagtactcatcacttccacttagaacccacggctgcacatcagcaaactgagtacatgcttttgttgatccaaatgtgctgacagtgcagtggcactgcttactgaagtctgctgtctgcaggctgtcacacaggattgtctgtaaatttatcagaacacttccaggaaggcattactgtccccattctacagacaagaaaactggtgcttggagaggtagggaacttgcccaggatcatgcagtgagcagagtctttctggccccagagctgattctgtctcagcttctgaaagcagctcacatagccaggcacatgctgtggcagggttctccctgccctactgttttactgcttctcaggaggccctgtggggcgggtgtctacaacgtgtacatttgtaggagtgtcccaggaggagcattttgttccacttttgctctactgctggctcgctctgtgtgtcttaggacacatctcttaacctctctgggctcaaccactgcacagtgaaggctctggattgataatctgtgaatgctgtgttctaattaaatagtgggtttcttggccttgggtattctgtgtctcatttttgtctttacttgttggctccacaaagcaaaacctattgtcagtaattcttactaactttatattgatgttgactgtgtagaccaattctagctacgttagccttttgttcatataaaatgaacaactgacacgtaattgttactgttttccatagtgcactgtgtcatcctgactccacgtatagagtgttcactgtgtgccagggctgctctcggataaaacctattctgttgaagtcctggctggccctaactttttaagtttaacaaggttgagaacacaagtgactttgattagcattgtcctaatctggtttatcagtagcaggggaatttataagcagttaccaaaatgcatccaaaataagatggcttaatggctaggcagaggggagagatgtgatgaagtcagtacagcagaatggtaacaagtgagcatctccctaatgggaatgggacattcctggtagagctgggagaaaaaatgaccaaagctactgggaaattctgcagagataattgtcccattactttttaattaattaaaactaattaattaactattttttttttgagacggtgtctcgctctgtcacccaggctggagtgcagtggtgcaatgtcagctcactgtaacctctgcctccaaggttcaagcgattcttctgcctcagcctcccaagtagctgggattacaggcacatagcaccatgcctggctaatttttgtattattagtagagacagggtttcaccatgttggccaggctgatctcgaactcctgacctcaggtgatcacccgcctcagcctcccaaagtgctgggcttatgccaccacacccagccgattgtcccattcaaatgagaccggcggaacatggttatattttaatttactcagttaatcatctgcagtgtcttgcctgaaaatggcttattttgaagtaggacctccagtccagttgtaaacttctagggaaaaaataccaagtctgccctctggggttccaagagtcgctcctgagccatggtgcgggggaaaggcaggctctctggcttgcagcatgggcctcatgtgaggcagttctttacaacaatggtggcccttgggccgtgcccaggccactgcctcagtccatacggcccgcaagctaagagtggttttcacatttttaaatggttggaagaaaattcaaagaataatgtttcgtgacacctgaaaggtatatgaaattcaaatttccgtgtctatacgtgaagtttaattggaatacagccacatcttttagtttacaaattgtccatggctgtttttgtgctacaaacacagttgagtagttgcggcagaccatatggcccacaaagcctgaactatttactccctggttctttacagaaaacctttgccaacgtctgccttacaagatggaaacattacttctacactctcagcaaacattacacagttagattctgagcacataagaccacatggtgaccatatctcatggcctacaaccttaactctttgatttcttttactttctgaaatgcagttttgtttttctttcatctactctagtagccaaagtagttggctctatccagcacacaatagaaagttctcaggcttctccatcagccttgccttagctttacatattaggtatgacctagagaaaaaaatgttggccccaagaattctgtataataaaaaatcaactatgaattgcagggtcacatttactttcagagattttcccaaaaggaaaaataattgctccttagatacgagagtggagaacaaaacactggaaagtacgctctgcccttctccgtgggtaggccacgcaccacgcacatttagctctgaaacatgtttcctgtgagaaaaccaatcacacagacaattaagaacgattacacaattaattcacatttcactaggatgtttactggctccctgcattacacaattaattcacatttcactgggatgtttactggctccctgtggcttaaatgttctcaaagctacactgtgtaaccacaggacaaacagaaaaagcaagttcaagtggcctcatagagacatggcttcaggaaatcattttttcctagagtgccacatgcggaagtgaggtccctgaaatgctcagtgggtcacctccgtggtgggactcagcattgctggctgattgcttttgatgagttaagtgacgactaacacacactcgcatagatgttctcatgtgtctgtgtttacagccttgtgcatgactttttcctttttttttctgcttcagcttttctgggtttttatttttttttctttgccagcagggaagccaaagaaacttgattctgaagtgcaatattgaatagaaatatgtaaatcaagtattatataattgaatattgatcaaatgcctttaagcagggccctatgcttagtgaagttcgcttgttcattccaagtgaacatactcattaagcacctgttaagtgctgtgcaccgccttacccaggtgagctgaaacaggtgtggtcactacccgcatggatcttgcagttcagagggggaggactggcacgtcagttggctgcacaagtggatgtgaaacagcaacttgacgaggactcagtggtaaagatagggagtcagaagtgggaaggctccagcaggacagcacgacactcctgggggatccaccttggaggcactgcttgggatttaggtctttgtgcagaaatcaatggaaaggcattgaagaattttaagcgaggaagtggagcgaccagatttgcatttcagaaagctcactctcattgcctagtggaaaatggatagtaggggacaagatgagtgtgtgtcaccagttaggaggttgttgcagagagagaagcaagagctgatagttttgttgaccagtgtactggcagtgcccagggaactggtgaggactgcaggaagtattgcaggggggtcgagaggggtgggggtggaattggcaggaccgagggccagactggatgtgaaggaaagaggagtggagactggagaggggcttggggagactagtgggtcaggggtgccatttgctgagacgggaggagctgagctcacctgccactgtgtcctttctcctgtgtcaggggctccctgctgccccaccccgccacaccttgttccccagtcctgtcctgtgaaggcctctgcctttggaggtgccgggcttcctctgtggtcctgcagctcccccaatcacctgccacagtgctctccatccacccagctggcagagatctctcctgctccccctgtggctcttcttgtatggaccgcggctggcaaattagcctctttccacccctcctagcatttttataatccaccctcccctgcagcacctagcccagtgtcctcaggtagggggaggtggggaaataatagacatccctgcagttgcatttagtgtgtgtgtgatgtgtgtgtcactttctgtaaaatgggttcttgcaggctcacctcactgacaggtccccacaatcctggcagctccaggactgtcagtcagctgctggcctttccagatgctcgtaggggtcttccatgcttcatggagaaatggctgtgagcactactcagtcatggcaattaaagaaacaggcactaaatttaaagggaacactgaaaggtagcctagaaaatgataccttagtggagcatgtttttctgaaaaaaaaaagtaaattatagcaaaacgtagatttttaagccaaaagtcaaccacacttggcccaaagggaaggaaaagatatatttgcagggtttcctgtgtccagaagaacaaggccctggctgtgagaagggcggtggtggtgcgtggggtagggcaaagtgtcgagccatgcaccaagaatggtttctctcccaacatctcctgtgaccattcaggcaattctgaaagaatctcagcatcataaaacattcgagtgacactccctgaggagacttttaaattcattaaaattgcaaaagctcctgaaaaggcacacagagaaatcatatcccgtggagccagttttcttgtcatattggcctcagtcgagacggtcctggacgccacgaacactagcatttatgtgacacttgcagggccctctaccaggtgtttgttttgaactcctttcttaactgttagtattgctgccactggtttgactaagtattttaacttccttaccaacatcttgaattccctactgcaagtgtttcatttttagcttgcctgaaagcactgaagtttgatgcatcactgtcttccagaagactgttgagggaaaccggtcccctgcctcaggggaacatgcgatcatcctcccccaagaacacgtggccccacacaggcacagctcagcagggcggggtgggccatgcagacctgccgaggggacacacgcaggacgggagcaatgctgttgagtagcgaccctcccgacaaggccacgctgcatcccgatattttccctttacttttaaactctgggaagtaagtgtaaagttctggcctccagtgaatcaaagtgcttcttctctaatgcgttcattatgaaaatattagtctcattgtcttttctttttcagaacttagactgtttctttattttgcaggcatgaaaacaaaaagaaacccgtgatcaatttaaaatctaatggtgagagagataatcggacactagattttctttttctgttttaaccaaaaaactctgtgacatgcatttgttgtttgcaccctcatgtgagtcctgaagcgggcatgctcacagggactgccattgcagctgtccctggggtggaacctgagggcttctggaggctcagttcttcacagacaggaccacacgggtgccatggaccacaggggcagagcattgtaatttgcaagtatgaatttgcaggggatcctggcctccatgtctaattaattatcagcaccctgtattttaccaatgaaatgtttcttgcctctctcctcatcctcagaagcacccattgctcatgaccggacaggctcttggagtaactctaactggtttcctcatacccagttcctcccagctcctgggaactcccagctcctccacctggccaccagcctccaaaccctggcttcccccgaccttcctgtgtaaggacggccaatgcctccccgtaccttcagggtagagtctgagctttctccattcctgggaggccccagccctgctctccagcttattcctcccaaggtcgcctctttgggtcaagccacagtcagcttttttcagctgtagcacacctatgcctctgtacctttgcccatgttgttccttctgtagggagttccttttccttttcctcagcccagtgagctcctattcatccttcaacacccaactcacgggaaaaatctagccctcctaccataacactgtggcatatcccctgcccagcttgggctctctcacctcctgtctccttaaaccccttataccttaaattaaaggtataatttgattaatagttttactgacaataacaaaaatattcgctgtttatttagccccagtatgtcccactttgctaacccagtatggaaactgattcagagctgctgtagaacctaggcctaggaatctgcctttttagcaagcaccccactgtgaatcactcttctagaaggacagctacctactgtgggggagacaagtacccagtgggttgtgatggagagtatgggcttgagtcagatgacttggatgggactcccagcttggccactcactggcattgtgattgtggccaatttcttaacccccttcagcgtccgtttgtttgcacagtgaaatggaaacattaatacttaccttgccaggctggtgcgaggatgagatggggttgtgtatgagaagtcagcacagagctggcaggtggtgccatgcaggtgtcagcagagttaagggattgttgatgtagtagacgtggtccgctccactacaccttgccagaccacctgcagggcacctcagctccaattcacagacgcgcctacagcttcctgcaccaagcagctgtgtctctctgcctgagggctttctctggctgcaggagcgtgctcagccctcacaaggcagcccaaagtaccagggagttgatgccctgggttgagagcaaccctcaaccaacagaggcaagttggtggatcagtaaccccactcccttgctcttcactgggacaatctggggagagttctgcagtctctcagggggccccagcaggctgagccttgcctgtccactcactgccaggcacccactcgtcatcatacccttcattggcttcctgtcttccttgtgtcactgtccccatggttcctgggatcacctctcaagtaaatgatgtggaccaaagtcctgtctcagggtaaccatctctgcttattcctctgccacgtctttcccttctcctctctgctctcataaagaagaatgggagatgaaagtggaggggcagctgaggtggggcggcatcaggctgatacaacaccccagggaaccctgcttccatgtaaccctgaccttaaatccctatcctataataaagagttgggcacaacagaagggaaaaggaagtattctgcaaattgttttccataacagtgcagaggacacactttgcaatgtgtaatttgtgcagtatgacatgcatttgggtgtgtctggtcaggtacatcatgtggtgtccctgttatgcattttgcagactgacactctgcttaaccagtccttccgtgctgtgctgttttgtaagctcttaaccagaatgcaaaaatgttaaataactgtctggttttattttccagccctctgggatgagtctgatgacagtaactcagaaattgaggctgctttacgccccagaaaccataacaccgatgattctgatgatttttatgactaacgtgctgtgacattggtttcaaataaagtctttaaacaaactaaaatcctgtgttaatatgtgatgtccaaaataaatatgttcttttaagttttctcactgttttatgggaaaacttaggactacattgctattcaagtgaaattttatgacataaatatgaacttgcatattcatttttaagttcatcatgaagcaaagtgatgaatgcaatgcccatcaaaattcaaggtggtttctatgttagaaattagccagctgatcttaaattcatatggaaattcaagaggcccagaatagccaaaacaatcttgcaaaagaaatacagttgggaggccgaggcgggtggatcacttgaggtcaggagttcaagaccagcctggccaacatggtgaaaccccatctctactaaaaatacaaaaattagctgggcgtggtagcatgcacctataatcacagctgctctggaggctgaggcaggagaattgcctgaacctgggaggcagaggttgcaatgagccgagatcacgccacagcactccatcctgggtgacagagcaagactccttctcaaaaaaaaaaaaaaaaaaaaaaaaaatagagttagatttctcacatttccttatttcaaaacttactgaaaagctacagtaattgagatactgtggtactagataaacagaaatcaatggaatattgactctgttgattcatatgtatctagaattgagaatacaaaaacactgtcacatttagtcaattaatttttgacaagggtaacaatttctgctactcaatgggataaagaatagccatttcaacaaatgatgctgggacaaatggatagccacatggccaaagaatgatcttggatccctacctcacactgtatacaaaaattaaccaaaatggatcaagaacctaaatgtaagagctaaaactacaaaactgtgttagaagtaaacataggtggccaggcatggtggctcatgcctgtaatcccagcactttgggaggctgaggcaggcagattgcctgaggtcaggagtttgagaccagcctggccaacgtggtgaaatgctgtctctactaaaaatacaaaaattagccaggcatggtggcaggcacctgtaattccagctacttgagaggctgaggcaggagaattggttgaacctgggagacggaggttgtagtgagccaagattgcaccattgcactccaacctgggcgaacccaggagacggaggttgtggtgagtcaagattgcaccattgcactccaacctgggcgacaagaacgagacttggtctcaaaaaaaagtaaacataggtgtaagtttctctcaccttggattaggcaacagtttcttagatatgaccgcaaagccttagatgtggttgcaaaagataccaccaggaaagttaaggccaggtgcagtggctcatgcctgtaatcccagcactttgggtggtcaaggtgggtggatcatttgagatcaggagttcgagaccagcttggccaacatggtgaaaccccatctgtactaaaaatatataaagccaggcgtggtggcacgcacctgtagtcccagcaactcaggagtctgaggcaggagaatcacttgaacccaggaggcggaggttgcagtgagccaagagagcaccactgcactccagcctgggtgacagagtgagactcccatttcaaaaaaaaaaaaaaagagtgaaaagacaatctatagaatgaggaaagtatttgcaaattatacatctaaaaatggacttgtatccagaaatacataaataactcttatgactcaataatttaaaaaaccccgattttgaaaatgggcaaaggatctgaatagatatttctccaaagaagatatacaaatggccaataagatgcatggcatcattggtcttcaaggaaatgcaaatcaaaaccacagtgaggtaccccttcatgccctctagcatgactggaatcaaaaagtcaggtaacagaagtagtgaggaggtggagaaatcgctggcagggatgtgaaatggtgcagcagctttgataaacactctagtagttcctgaaaaggttaaacatagagggattatgacctaatgattctactccaagagaaacaaaaacatatccacacaaaaacttgtacaggaatatttatagaagaattattcataagagccaaagagtagaaacaacccaaatgtccatcacttataaatggataaacagaatatccatacagtagaatatcattcctcaataaaaaggcatggagtactaatccatgctacaacatgggtgaaccttgaaaacattattctaagtgaaagaagtcactcacaaaagaccacataatgtcagattcatttctgtgcagtgtctaggacaggaaaatccatagacaaatgagtagttgtctaggcctggggtcgggagaggagtgactactgatatgagggattttggcagggataatgaaaatgtcctaaaattcattgtgctgatgattgtataattctgtggatacactgaaaaccattgaagtgtacactttaaataggtgaattatatgctctgtaaattacatgtcaatactgtttagaaaaaggaaattggtaattcatacatcttggggtgtagtgactacaggcaactcttggtgcaacactttctcacttttaaatggtcactttagtcaatgtcagaagttaattgtgcaactcaggagcctgggactcatggtgggtcatgtgactactctggcttcctttgagccctcagaatctctgaaattgaaatgatttttaaagcattgtgtgtattttgtttttaaatcacctcctgcttgtcacttacctactcaagaacttgggagatgtctttgattcactcctttattctcccttctttccactcaaattaccaaggcctttcctatctcttccctgccatcatcaccatccccatctgagccttcacacctgagtttctgcagcaggtgtcttgatattgcccttggcaactaagaaaaatcctgccatgggtttcctttttctttcttcttaaaaaggtataacttgggtattattaatttgctaataataaaatagctgctatttattgagcaccctattataacccagacactttgcttgctcagcatagaaaccaactcaaagctgatgtagagactaggaatctgcatttttagtgattcctgtgggaatcactgttctagaaagacagctatctactatgaggaaataaatccaactctgaaatccatgtttttatccatttgatgggaggcaaggaatgttggctgtttggttttttgttgttgttgtttgttttgttttgttttttgtttttcttcattatgttgttctggcttagttgttctaataaaatatttcattctttggtttttaaaacttttaagctttatactacagcgttatttttctatattctctcttccctatccacaattattaaataatgggagttgactctaatggtaattctccacataaataaagggggtactttatggctcaaagcacacgatggaaagatttagaatcacgctattttaggactggaaaagcttttagagatcacatggtctttgaattttagagtcaaaaaggacattattcatcaaaacttctcattttagaaaacttggtcaaaagtgatacataaatatggcagctaagtgaagagcaatatagatactaacttgtcagtagacactaagaagacaaagagaagcgtgcctggcaaggattgaagttaaatggaaaaatgtggcttgcattggccaatgcaatgtgaacacaagtaaccaatgccacttttggttagaagctttagtgctatgtgtgattctctcctctttcctgcatcagcagccatggcagcatgggacaagtggagcctccatcagcctggctgcatcagtgactaggaagagcagacctcccctgctaatcatgtttgcaccactggaattggcaggttgttaccacaggaaaattctggtctatcctgaccaatatactattcttccatttacgtatactcttttttttttttttttttttttgagacagagtctcactcagtggcccaggctggagtgcagtggcagggtctcagctcactgcaacctccacctcccaagtgattctcccgcctcagcctcccgagtagctgggatcacaggcatgcgccaccatgcctaatttatatatttttagtagagagggtttcaccatgttggccaagctattctcgaactcctgacctcaagtgatctgcccgcctctgcgtcccaaaatgctggaattacaggcatgagccaccacgcccagctatttatgtatattctgattaggccacgtgtaatttaattttggagtggtgagacttgcaaggtttcctaaatgctcactgaataaacattacacctttgagatttttttaaagaaaatttgattctgaataaagaacatattttttcctttttccagttaagaacctcaagtatctgtggttagactatttctaaatgaagtggtaacaattacagttgcagaaggtgaggaacaagttgcacaccttggggcagggattgggggacatttttagaactgagctgtggtagtcaataaacgggagtctgttgacaggaaaacctccagaaaccacagcctgcggggaagccctctgtggtttctggaaagcaggcacagcatctggagcatttccctgggtatttgtatgtatctccactggaaagtagcaaatgaactgggttcctccaaccatctgacccaagaggtagaactgaattctccctcctccccccatttctaatgtgggctggacttagtgactcacttccacagaatagagatggaaagggggaaatagtaatggtacagtggagaaacctgcctgacaccaccttacgtgatgaaggttaacacccatgagtcatgactcgtgtggatatctggaaccctgacatgctgccgggagacgggcacttctcctctatagtgttctttctgaaaaatcttaaccacagcttaatcatgaaaaatatcagataaccttgggacatttgacaaaacacccagccattactcctcaaaacagacagtgtcatgaaaaccaaggaaagactaagaaactttcacagaccagaggagaaagagacatgacaactaaaatgcattgtggggccctggtgggatcctcgaaccaaaaaaaggacattcacggaaaatctggtgaaatgtgagtaaagtctggagtttaatattaatgtaccatgttggtttcttagttttgacaaatgtgccacagcaatgtaagatgataatattaagggcaactgaaactgggctaggggtatataagaactctgcattatctttgcaacaaatctaaaattattccacataaactaacctccatcaataaatgttattgacacttgggtgataccctttcacactttttctgtgcacatatgctttttcattctcttaaacgtttctatttttaatctcaatgttaccaggcttaaaagattgatacccactaagaaaacaaaacaggccttcaaccagggcactaacttgctatttgtcagcaatgctgatggggtatacagagtcctacatcttaacatcttttacctacagatcacatgctgcactgatgatagtccagaagaaagcctaggtttgctgctagtctttaaaactttgctaaccattttcttactttgtagcaatagagtaggcctaggaccccacactagtagcaagcaaaattttccagctacaatttaacctttcttttttctttttagttactttctatttatctcaaatggctctggtttaaaatgtacagaagtggccaggcacagtggctcgtgtgtgtaattccagctacgtaggatgctgaggtggaaggatcactgagtccagggaggtcgaggctgcagtgagccatgatcatgacactgcactccagcctaagcaacagaataaggccctgacaaaataaaaataaataaaataaaatggatagcagtgatataaagttcccttttaaaatacattttagggaaaaagaaagttgaccttcaaaaataagcttaaaaaaaaatagaacaagtgctaggagggcacggccaagtggaaggaggggaaagttgctctgttaccctcactaaatacctctctgatgtattttggggtttccagaggatcaggcttcatggggaggtcacacatggagcccatggctagtcctgtttcccaggtgaaagcactatcactatcacagcataagttaataacccgatcttcccatttataaatcaaacttttgtgagtttgattaacatgtggatcctgtgaactggtgaaaccaagcaccacaactcacagagtttaggactcagctctagatctggggtagccactccccaccaactccctactgaagttcagatacagctttattatttggtcattctgcagtcctcccccaccccccaccgccaattaaaggagatttttgttttattttgttttgttttttaattatactttaggttctggggtacatgtgcagaacgtgcagttttgttacatagatatacacgtgccatgatggtttgctgcacccatcaacctgtcatctacattaggtatttctcctaatgctctccctcccctagtcccccaccccccaacaggccccgttgtgtgatgttcccctccctgtgtccatgtgttcccattgttcaactgccacttttgaatgaaaacatgaggtgtttggttttctgttcctgtgttagtttgctgagaatgatggtttccagcctcatccatgtccctgcaaaggacatgactcatttttttatggctgcatagtattccgtggtgtatatatgccacattttcttaatccagtctatcattgatggacatttgggttggttccaagtctttgctattgtgaataatgccgcaataaacatacgtgtgcatgtgtctttatagcagcatgatttatagtcctttgggtatatacctagtaatgggatggctgggtcaaatggtatttctagttctagatccctgaggaatcgccacactcacttccacaatcgttgaactagtttacagtcccaccaacagtgtaaacgtgttcctatttctccacatcctctccagcacctgttgtttcctgactttttaatgatcgccattctaactggtgtgagatgctatctcactgtggtctggatttgcatttctctgatggccagtgatggtgagcattttttcatgtgttttttggctgcataaatgtcttcttttgagaagtgtctgttcatatcctttgcccactttttgatggggttgtttgtttttttcttgtaaatttgtttgagttcattgtagattctggatattagccctttgtcagatgagtaggttgcgaaaattttctcccattttgtaggttgcctgttcactctgatggtagtttcttttgctgtgcagaagctctttagtttaattagatcccatttgtcaattttggcttttgttgccattgcttttggtgttttagacatgaagtccttgcccatgcctatgtcctgaatggtattgcctaggttttcttctagggtttttatggttttaggtctaacatgtaagtctttaatccatcttgaattaatttttgcataaggtgtaaggaagggatccagtttcagctttctacatatggctagccagttttcccagcaccatttattaaatagggaatcctttctccattgcttatttttctcaggtttgtcaaagatcagatagttgtagatatgtggcgttatttctgagggctctgttctgttccattgatctatatctctgttttggtaccagtaccatgctgttttggttactgtagccttgtagtatagtttgaagtcaggtagtgtgatgcctccagctttgttcttttggcttaggattgacttggcgatgtggggtcttttttggttgcatatgaactttaaagtagttttttccaattctgtgaagaaagtcattggtagcttgatggggatggcactgaatctataaattaccttgggcagtatggccattttcacgatattgattcttcctacccatgagcgtggaatgttcttccatttgtttgtatcctcttttatttcactgagcagtggtttgtagttctccttgaagaggtccttcacgtcccttgtaagttggattcctaggtattttattctctttgaagcaattgtgaatgggagttcactcatgatttggctctattgtttgattatctcaatagatgcagaaaaggcctttgacaaaattcaacaaccttcatgctaaaaactctcaataaattaggtattgatgggacgtatctcaaaataataagagctatctatgacaaacccacagccaatatcatactgaatgggcagaaactggaagcattccctttgaaaactagcacaagacagggatgccctctctcaccactcctattcaacatagtgttggaagttctggccagggcaattaggcaggagaaggaaataaagggtattcaattaggaaaagaggaagtcaaattgtccctgtttgcagatgacatgattatatatctagaaaaccccattgtctccgcccaaaatctccttaagctgataagcaacttcagcaaagtctcaggatacgaaatcaatgtacaaaaatcacaagcattcttatacaccaataacagggtggttttgtaatggtagttgcctgtaagtaatcccagctactcgggaggctgaggcaggagaatcgcttgaacccgggaggtggagcttgcagtgagccgaaattgcgccactgcactccagcctgggcgacagagcaagactccatctcaaaaaaaaaaaaaaaaagaatcatagttacctcctaattgatccaaaagccaatgcgatttcagtcaaaatcccaacaggtcttccaggtacttaacaagctggtcataaaactcagaaggaatttaaaaggccaaaatgttgaaggcaattttgaagaataaagagaaggggtcttgctatagcagaaatcaagatttattataaagagcagtaattaggccatgtggtgttggctcagggatagaaacatggagcagaatacaggctctagaaatattcccaggcatgagaactgagtgtgggaccgatgtagtattagaaatcagtgaggtgatcaccaccttcccaatcagggctggaccaactggcaagccacatggcaaaatagaaaattaaatttcgacttcatccctaacacgaaagaaattcgtgctggaataaagaactaaatatgaaaaagaaaactttaaaacttttaaagaaaaaaataagtatctttatgactttgaagcaaggaagaatttctcagccaagacagaagaagcaaaaactcataaaaatattgatgaatatcacaacattaaaatttaaaacttctgtggctgagcacagtggcttatgcctataatcccagcacttcgggaggctgaggcaggtagatggcttgagcccaggagtttgacactagcctaggcaacatggcgaaaacccgtctctaccaaaaatagaaaaattagtcaggcatggtggtgtgctcctgcagtcccagctactagggagtctgaggtgggaggatcgattgagcctgggaggtcaaggctgcagtgaagtgagatcactgtctgccatcctgggtgacaaaaaaaaagagagagagagagaatgaaggaaagaaggaacgagggaaggaaggaaggaaggaagggagggagggagggaggggaaaaaagaaaagaaaaaagaaagaaagagagaaaggaaggaaagaagaaagaaagaagagagaaagaaagagaaagaaaaaagaaagaaaaagaaagaaagaaaaagaaagtaagtttttaaatgacaaaaataccaacaaaaaaagacaaatcattggctggaaggtgacatttctaggatatatatccatcaaagacctgtatctggaatacataaagaaacatatattgagggccaggccgtgactcacgcctgtaatcccagcactttgggacactgaggctggcggatcacaaggtcaggagatcgagaccaccctggctaacatggtgaaaccccgtctgtactaaaaatacaaaaaattagctgggtgtggtggcgggcacctgtagtcccagctactcgggaggcttaggcaggagaatggcgtgaacccaggaggcggagcttgcagtgagccgagattgcaccactgcacttcagcctgggtgacagagcaagactctgtcttaaaaaaaaaaaaaaaagaaatacatattgagaaaaatacaactcagtagaaaaacacaaaggatcagaatgagaagttagtagaaaatgaaatccggatgatcagtaaatgtaaaaggttcttgaactcactagcataaactgtgaaagtgacagaggataaggtgccattccatacccaacagactggcagagagtgagaggcagatcacactgataattgggaaggacttcagggaagagggactttgacacagtgtgaaaagcccgtttgcaacatcaagtgaagttatagacgggcatgtcctgactcagcaactccatttctaaatgtatactctagagccacgcttcccagcacagtcaacaccagccacatagaacttgagcacttgaaacatggccagtccaaattatgagacacacactggatttgaagacttggtctgcaagaaataatgtaaactattttattaatttttatattgttcatatcttgaaatagatatattagatatattgggttaaatatagcatcaaaattaatttcaacagtttctttttttaccagtttctttttgctttttttttttttttttgagaaagagtttcactcttgttgctcaggctggggtgcaatggcgccatctcagctcactgcgacctacgcctcctgggttcaagcgattctcctgcctcagcctcccaagtagctgggattacaggcatgcgccaccacaccagctaattttgtatttttagtagaaatggggtttctccatgttggtcaggctggtcttgaactcctgacttcaggtgatccgcccgtctcggcctcccaaagtactgggattatagacatgagccaccacacctggcctctttttgcattttctaatgtagctactagaaaattaaaaattacatatatgatctgcatttgtggttttattatatttctattggccgaagctgctatagagaattctggccattgtacacaaagacatgtccaaaatttaattgtggattgtttgaaataggaaaaatttggaagcatttgggcccacggacaggaaaatgataagaaacacatcgctagaggatttatacagctaatgaaacatatgtaaaagtgaaaagagaaaaaaataatgtgtacaattaaaaacaaagtaattcaatgagtcacttaaagatagagaggaaaggactcatatagaataaaagtataaaaacatggatggaagggatttgtgagcgcttcaagaaagtgattagctctggggaagaaaaaagattagggtgggtggtacacagagaacttcaatgcatcagtagtggcttatttttttaagcaacttggttgggcacagtggctcatacctgtaacctcagcactttgggaagctgacgcaggcagatccctcgagcccaggagttcaagagcagcctgacaaacatgccaaaacccagtctctacaaaaaaaaaaaaaaaaaaaaaatacaaaaactagccaggcgtggtggcacaggcctgtagtcccagctactccagagaatgaggtgcgaggatcacttgagtctgggaagcagaggttgcagtgaggcgacattgcgccactacattctggcctgggcaatagaatgagaccctgtctcaacaacaacaaacaacaacaacaacaacaaaaacccaaatactctctcaacttcatgtacttgtgagtgtagaaagacataagacagatattcttcagttatatcattgataaccactaatttttaaacaaatttccaatgattgcttgctataaaaatgtaaaatggtatatatattattcaccctgtaattttggtttattttcttttagacttttttccaatgtatattttttggaacagttttaatatgtttacttatcatttaccctgactttttgaaacctagtgttgtaaatgttacttatgtttacatagcaaaaaaaaaatctatatggtctaggcaaatatggcaaagcatcaacatttatcaaatatttgtcaaatatgggtggtggccacatgttatttgttatgtttttctctgaatttttgtgggtttaaaatagttcataattttaaaaaagaaacaggtcatgaagagtgctatactgatgtgaaggaatttgaactttattctattggccaatatttggaagccattgaagaattttaaacaggggatgagatttccatgttgagagagcatttgtattctgacagtctcattttaggcccatcaagtccaccagctagtaaaagtcaagaacagaaatcaccatatttcattgcttctggccactttgtttcacattttaacaattccggaattggaatgcatctcgttggccacacaacagtcgtggcattgttgtcattgcagaatgggtgtcagctgcttcgatagaagtcctggggacaatagtggggaactctgacatgctgcatcaccagtgtgcttcatggcaccgtggatgacatcacgtggggaaagtgacatctgccactcagaatcaaaaagtgatttggaagaggcaagtttgatacgtgaaggagctttggaaaagcattaactcatttcgttggcctgtgttttcttttatatacatgcataagagtgaaaaattttttcttaattttttaaaattatggtaaaatacacataaaatgtaccgtcttaaccattaccaagcgtacagttcagtggcattaagtgtagtcacactgttgtgtaaccatcaccaccatccagctccagatctttctcatcttgtaaaactaaacctctgcatccattaagcaataactgcccattcccctcttcctccagtccctggcaaccacattctaactttccttttttttttttttttttctctgagatagagactcactctatcgcccaggctggagtgcaatgacactgtgtcagctcactgcaaccttcatctcctgagttcaagcaattctcctgcctcagccttgctagtagctgggattacaggcactcaccaccacacctggctaatttttttaaaaatattttcagtagagacggggtttcaccatgttggccaggctggtctcgaactcctgacctcagtgtgatctgcccacctcagcctcccaaagtgctggtattacaggcatgagccactgcacccggccccctaactttctatctctatgaatttgcctactctaggtacctcagttaggtggaatcatacaatacctgttcctctgtgcctgtcttatttcacttagcatcatgttctcaaggttcatctacactgtagcatgtgtcagaatttctttcctttgtaaggctgaaaaatacttgaatgtatgtaccacattttgcttatccatttatccatgaataaacacctgggtttgcttctgccttttggctcttgtgaataatgctgctatgaatatgggtgtacaaatatctctttgagaccctggtttcaattcttttgggtatatacccagaagtggaattgcaggatcatatgaatcatatctatttttaatttttgagaaactgtcagactgtttttcattatggctctgccattttacattccccccaacagtgcacagatcccaatttctccatatcctcaccaacacttttttcttttttttaaaaaaatagtatccatctgtattagtctgttctcacattgctaataaagacataccagagagtgggtaattgataaaggaaagaggtttaatggactcacagttccacatggctgaggaggcctcacaatcatggcagaaggagaatggggaataaagtcacgtcttacatggcagcaggcaagagagcttgtgcagggaaactccaatttataaaaccatcaaatctcgtgagacttattcactaccaccagaacagtatggaagaaactgcccccatgattctattatctccacctggccctgcccttgacacctggggattattacaattccaggtgagatttgggtggggacacaaccaaaccatattattatcttaatgggcatgaggtgatatttcattgtggttttgatttacatttccttaatggttaatgatactgaatattttttcatgtgcttattggtcatttgtatagcctctttggagaaatgtttattcaagtcttttgcccattttttaaatcaagatgtttggttttttgtggaatgattttttaaatctatgtttaagcctaaaagagtgttttcaacaaatataaaacaaatattctaagagaaaaggaagcattatatcacaggttaagtggaaggttttttttttccttcttagtggtacataaaataacattaaaacttacaattaatagcattttattttattttattttatttattttattttatttttttttattttttgagatggagtctcactctgtcacccaggctggagtgcagtggcgtgatctcagctcgctgcaacctccacctcccagattcaagcaagtctcctgcctcagcctccctagtagttgggactacaggcacatgctaccacgcctggctaatttttgtatttttagtagagatgaggtttcaccatgttggccaggccagtcttgagctcctgacctcaagtgatctgtctacctcagcctcccaaagctctgggattacaggcatgagccaccatgcctggccattaatagcattttagattcaattaaataatggttataatgagaggatgatttaatgaactattgtcaaatggactgagataatttttaaatatttatataaatgaaagaatgttgaacacataagaatgtaagacttaaaatatatttaaataagaaattattttgaatccaaatatgatatcaaatgaattagaatagttgaaatttaggtaggaataaacagttataatttcacttcagcaagtagaagtttgggataatgtcaaaaactgaagcaaaaaggagacagtgcatcagtatgcatttgctctaaagattttttaaaattctatcatccttcataggaaaagaaggagggggttcactacctctttagtgaaagacgaccacatacattcccaattgattcttcacttttcaccccaaatagtcaaattatatctagtcgacctagcctatttttttgttgtcattttttgtttttctttttctttctttctttctttctttctttttttttttttttttttttttttgagacagagtcttactctgttacccaggctggagcgcagtggcaccatctcagctcactactacctctgcctcctgagttcaagcgattctcctggctcagcctcccaagtagctgggattacaggtgtgtgccaccacacccagctaatttttgtatctttagtagagacgagttttcaccacgttggccaggctggtcttctgacctcaagtgatccacctgcctcagcctcccaaagtgctgggattacaggcatgagccaccttgcccagccctagtctattgttattgcagaaaactgttagactgaccccctgtatttttctactcctttgtcacagatgcctgaaatttctttcactgaataaaaaggttcttggttcatgataagagataacacttaaaatacaattgcctggtcaccgtcatcacttataatggtcagagtccttagttgcagacaaaagggtccactctagcttagattaggcagaaagggatttattgaaaaatatttgacaacaccagaatctccaggagaactagccaactaggctgtgtgttcatatagtcactacaatgaaaccagaaaaaaagtgcctagttcctgttctagtgaaaatgcttctgcctccactgcctgccaactgtgatgtcacaaacttggccttgactgcttgggaagacctgactcctctgctgctgtgcttgctggaaggcccagttcttctacagagggatcgtcctgtagtttgcttctacattcagggcttacaggggtgcatatgattgggaggttcgaggtcacatgtgtgcatcatagctgcataggagtctagaaaagatcatattacatactctcacctctatgacataggcaggcaaatcctatagggattgaaacaggaatgtgagttgagttggcaaacttaacaatagctgccaaactcctggactgaaacacaagctaaaatataaacaatgaatcaagaagtataaataggctgggcacgatggctcacgcctgtaatcccaacactctgggaggctgaggtgggaggttcacttgagccccggagtttgagatcagcctgggcaaaatagtgagaccctgtctctacaaaaataaattagatgggtgtggtggtcccagctactagggaggctgaggtaggaggatcacttggacctgggaagttaaggctgcaaccatggcactccagtcttcacaatagagcaagactccgtctcaaataaaaataaaaaagaagaggaagaagaaaaggaagaggaagaagaaggaggaggaggaggagaggttggaggggggaaggggaggaagaggaggaggagaaaggaggagaaggaggagaagagaaggaggagaaggaggaggagaaggagaagaagaaggcataaatataatagtgaactttatatctttctcaacttcaataagacagggtcccaagaagagactagggtttcttggatatctgaagtgaaggaagcatcaaccttagaggaagaaaaggaaccagacaaagcaggggactaaggctggaatagacaaaacctccccattcatcatttgttataggagagcctgttacctttagcaagataggacaaataggagttgttatccattctaaatccaagctctgctgggtctgcattatgaagttttcccccagttcttaagggagaaagtttacttatacattgacttcattcccaaaggattcattgaatgaatcacacaaggactacagtatataaacttgttattaggttaatgtaaaagtaattgtggtttttggcaataaaaatggcaaaaaccacaattacttttgctccaacctaatacattagacacttatagctcaagagatgttttttccctaaagatctctgataatttacaatatttgggctccatgaagccaagtatcaaagacatttgtagacgtcaccacacaccccaccaccttcaagacctgtggcatgacttggcctccagagagatagctgacaactttaaggcaacttcaaagaggcacaatttacatgtaataaaatgctccatgttaagtgtacagttttgatacatgcatacacccatgtgatcaccaccacacttaagaacagtcagcataggcttttaaaaagaggagcctagggcaacccacttgggtccccttccatgctgtggaagctttgttctttcgcccttcgcggtaaatcttgttgcttctcactctttggatccgcgctgcctttaagagctgaaaaaaaaagatgagcctaacaagcaagtatttgtaatgtgtcttctccatattcccagccagtgtataaaatagattcatttggcatggatattaggtttagtggggaggaatgcacactgccatcacagaaatgccacccactcattcccgttgctccgttcttgcttggcaagttatctcctgactgcggttggcttcccttatggccatcttggacttcctcaaagcatggtggcttcaaggcagcaagactttctgtgtggtagctcagtcttccaagagcaagaattccaagaggcccaaccagagctgcaatgcttcttatgaccgagcattgaaagtcacttccgctgcattctgcaggtcaagcaagtcactgggaccagcaaggggaggggtatgagacctcccctcttaatgggtagagttgcatgtgtatacaacagaaactatcatggagctgtatttggagattctctacaacaataggccataaaatggcttaaagactttttggacagagcagtgaacagacgctaaggatatggggttcaggctctgccaggcttgctcaggtgacactcgctgatcccatagaacacatcggggtttcctctctccagtcgcttggggtcaaatgtgaatgaggtgcatacaaatggggagagccctgtgagcctgaaggaggagccccgggcctcaccactgttcttaattgtggtggtgatcacatgggtgtatgcatttatcaaaactgtacacttaacatagagcattttatgacatgtaaattgtgcctctatgaagttgacttaaaggggtcagctcccccaccaaatcagtgtgggcatttcccacaggaacttggtgtgccacagcagaaagtctcagaattggtctggtgacagcagcatgagctgtggatgagaaagccaccatgagagcagggcctgggcttcctctgacttcagccctctgaggccacctgctgcctgggacccatctgttccctgccctgagggctactgttggagacgttctgctaaggctgagtagagaggcctcagccaggctggatattgagactaaagttgaaaaggaggattcgattctggaataaacaaattggaaagaagaattctctgaagactccagggtgagattccagaggcctgtgtatttggggaagcccgagaagcagagaacagaggagcagagctgttggaacagcctacaggcgagcaaatggggagaaatgaaaagacaccaggcaggccccagcaaaagaaaagaaatgtctcccaggagagaggccagaaccgtctggagctcggggaagttgtccgccacagccccagcctggccgccgcagcaggaatctctatgcatgtgccgaaggtggcaccagggggtgcacacgggggaggagcccttcatctgcagcacatgcagcaaggccttcagtcagcactccagcctcactgtgcaccaggtgtgcacacagcgtgaagccatccatgtgccctgagtgcagcaagacctcagccacagacagctcttgcctcctgatgcaccagaggagccacacaggcaagaggccctgtgagtgctctgaatgcggcaaggctttcacccgcagctctgacctcctggtgccccaggggacgcacggtggggagaaaccccatcgctgcacccagtgctcagtgtgggaaggcctttggccagagctcccacctcatctttcaccagaccactcatgcctggaggaaacaccagctggttttcctgagcagatcctagtgttgatgccccagggcttcaggtccaacactgaatccaagtaagagcaagctgagcctttgtcagcaacctagctccgtgccaggagctgtggaacaaggctggggcaggctcccccagggtctttggagagacaagatacacgcacatgtaaacatacacaagtgaccaaatgcaccaggtgacaagacaggataaagtgctgaagcatgtgagagatggcaagattggcctggagggggtgctgaggcgaggcctcactgggctggttctgggagaatggcttggcaccaggttgaggggaggcaacctggggaggggaccaagctaagcacaaggaagactccatgtgggccccagtgaaaggagagactgaatacggagtctcaagtcaggcttgagatgcacatggggaagtggagggttcaggtccgaagccctggtgtgtgagagctacaaccaaatccacagtcccgcccacactactgggtttcctgtgccagggtgacccgaggtgagccattgagcatcactgtcacagctgtccagggcaaaacagatgttgtgtgctctgattcaatgccctgggtcctccactgacactgccacaagcaagcttgcagccccaggagcagtggcacggctctgcctgcttcccactctccaaatctcttacaagcacatctggttagtaggacctacctagagcacaccagaaccctagctgcaagggagtctaggaaacgtagtgatttgctttccatgctctgcagtatagctagacataccagaaggggctggaatggatgtggagtaccattctaccatatccaccacagaaatctacagtactagtcctggaatacacttgagaaggattgttctcaacagagaatgaggggtaaattctgtgactttgaagcactaaaatctacctcactgaattctgtccttagggacccatcccttcaactccccagcagaggccaatccagggtcttccattaacatggggaagcacactttctgcaggcataaacacaccaaggcaaatctcggtgggtttaccttaccttacacagagaaggcccataaaatctcctgcatttgctaccactgggacttggctatccttgaacttttcatttcgatgaattgcttttctaaatgtgctatatgtgctgctcaagtgagcacagggaatttttttcctaattttgcctcctttttaaagggtcaccatgcccctctgtcctcctgactttccccgttaccatgtgctttaatagctcagcatgtacttgtgttaccaacacaagatttattcaggccccagttctttatttgtaacagcttttaagcctcctcctccttttcctcagcaaaaaaacaaggaaaccaagcagctaccaatcctgacagcttttatccaatactcaagcattcgtccactctcgatattcctgtcactaacggctgtgtcatcagcggacttcttcggcgacaatcagatcttgatggatcacactggcaaaaacacattaaagaagatcgcattaattccagccccaaatccaagcagataaggatgatatgactcaagaactcaccctaagtgacagaaactgaactcctcctaaggaaagactctttagcattcagcagccgagatttcaagtctaactgcttttggtggtagtttcatatgtgtatttcaaaaatcacctggaaatctccagctccttaaggcggctccctttaaatctttttgaatgacatggtgttgtcaattgcctccttctactgacatcttccatgtcctcaggccagtccagccactgacacagactaatatttggtgacagatggttccgtgagcttctgggaaggccatatctcacttttggaatgcgagtgatagctgagttcctccagagccttatttattacactattactacacacaaactcattagatgtaaaaccctctgccagtcaacttgatcctgctcttccccagctgtcccactggcagcccaaagatgatgacacatgatgacactgacagacagcccgactgccatcttctgccttcctaaagttaaagccgggcattactcaagcgaggggatgtgccagggaaaaaagctagaaagcctctctggagcaccctgcggtttaatcaccacagtagttcatgaaatggtgtacacagggtgccactggccaagccttcctggcatttgcgagcacactcattgccactgtatgaaatcaaccgaaatcggatgcatctctccctccagtcccctgggaatgctgtcagtcttgcctcctggtcccaattctcaccgaggaccagtctttctctctgttcagatatacctgcatctagtctcaatgcacacacatttctcattgggatttttgcagcaacataagaagtagcactttatttattcacacattcaacaggagcatcactggggaatacttgctgtgatccagccaccatgccaggctggatacatggagaaatgagtttggcatgatccctgacttcaaggacttcattgtcttgtagggaaaaaccagatcatctcaaggtgaattgtttagggcaatgtctcagctgctgtgacaaacaggccccaaaatacagtggctcagagaacagggaagttcattttgctctcattcgttaacagcctccagcttggcaggtggctctgctccgcacgttctgaagcccttccatttcattccatttcatccctccaccaaccccaggggaccatcctggtctgcatggccaagcaagttccaggcactggagaagggagagagtgtggaagtcctaggaaagagatgtccttttaaggagggccatgggaatttctccagttccatgggtgaatgcttggctacttggccacacctagccatggggtaggtcaggaaacattcaccacctgggcagccatattctcaggaagaagagcaatgtgaattttggtggaaaactggcagtctttgtcacacaatgctatgtgctaaatattgacgggaacagctcaggagaggccagaccatgcaatggttaaacagtctggttcaggagttggacaaatctacattcaaatcgcagtactcaacacagtgtcatatacatagtaagtacccaacagttattagctgacagcattgtttttactattccatggaaacgcacttggatcggatagactgcctatgagtggttcctgttaggcttagataaggaagtaagctttgggctgagtctcgaaggtccagcaagagttcagctcgtgcacaattgggggttcagtcattctgggcatgggtgtgccaagggaagtgtgtgaccaggatattatttttacctgtgagcagtgagaattttctcataccaagggagctcatattaggctcctgaggttcacattctcaccttgtaataacattgaacctcagcaaatccccttgggaggatgagagagaagagagaccatcaacatacatcatgagaatcagtgagcaggaacgtgctgaaactgaggacagacagtagaaaacccaggactatgatctaatgagaaactcatcctccatgtcttggaggataagaatccaaactggagtctttataatcctaaagtctcaaatgatagtcttttttaaaaagtgtgcactgcagtcagataggtttggcaagtgctttacttttttaacttttgttttagaattaagatattttattttagaatttagaattaaaatattttattttagaattaaaatacatgggtaaattgcatgtcctgggggtttggcgtacagattattttgtcaccgaggtaataagcgtagtacccaataggtagtttttcaatcctctccctcctcccaccctccaccatcacgtaggccctagtatctgttgttcccttctttgttaccatgtgtactcaacatttagctcccacttataagtgagaacgtgcagtatttggttttctgttcctgcatttgtttttttgggataatggcttccagctccatccatgttgcttcaaaggacatgatctcgttctttgctattgtgaatagtgctgcgatgaacatacgtgttcatgtgtctttatggtagaatgatttatattcctttgggtatatatccaataatgggattgctgggtcgaatggcagttctaagttctttgagaaattgccacactgctttccacatggctgaactaacttacatttccaccagcagtgtctaagtgttcccttttctccacaacctctccattttttgactttctaataatcgtcattttgactggtgtgagatggtatcacattgtggttttgatttgaatttctctaatgattagtggtgtagagcattttttcgtatgctcgttgtctgcatgtacgtcttcttttgaaaagcgttcatgtcctttgcccagtttttgatggggttctttgttttctgattgttaataagttccctgtagatgatggataataggcttttgttggatgcatagtttgcaaatactgtctcccattctgtaggttgtctgtttactctgttgatagttcttttggctgcgcagacgctctttagtttaattaagtcccagttgtcaatttttgtttttgttgcaattgcttttggcattttcatcaggaaacttttgccggggcctatgttcacaatgatattttctaggatatcttccagagtgtttatagatttaggttttacatttaactctttaatccatcttgggttgatttttgtttatggtgtaaggaaggaatccagtttccatcttctgcatgtggccagccagttatcccagcattatttattgaatagggagtcctttctttattatacccccaacgtgtgcgagcttcttaaattcttggagtagtcctgtaataaggaaactcttgttttccccatttttcattgaacggtttgatcactgcattcaactgaggtgccttgatgtggccaatgagcaaataattttgagacacggtcttatcaagtaccctgttcctgtggatgttggcctacggtaaatttccactaaccatagctccttatccctgtgtgtggtaagctgtctgtttagtgacccccaacccccataagcctctccttgtatctaattcctttgaagctggcttggctctgtgactgtggcagaagtgacatagcactggttctaggcctaagccctgtgaagttctggcagcttctatttttgcactttaggggaagccagctgtcacgtaagaaggccaactactccgagacaaccatgctgtgaggaagcccaagctcaccacatggagaggacatgtggagagaacccaggaacccaggcaacagcaagtgactcctttcagcccccagcactggagcaccagaggtgatgccacaggaccagagaggagcacctgcccgaagcgcagacttggagcaaagaagcaattgttgttttttatgctccatgttctgggctgctctattacacagcaatagatattcagaactgcgttttccatctggctgagtggagtcctgagcagaccagctaggtcccctgatgccttcaccctcctttcctctgtggtcacttctttccttatggcctaagtcccccagccagcatctccaaagaacaaggatggcccctccctagtcacaacactatcatcgcatgaagaccattgacactaactcaagaatgccatccaatatatagtccattcacatttcccagtttgtacaaacatcttctattctagcatattttttttaactcaaggagctacttaaggcttcctcattgcatttggctttcatgaatgtgaagaattcctgaaaggcatttatttcactaaagaaaaaagatcctcactagaagtcagctgggagtagtgactcatacctgtaatttcagcactttaggaggcagaagtgggaggactgcttgagcccaggagtttcagaccagcatggccaacatagtgaaacctcatctctactaaaaatacaaaaattagccaggcatggtatcatatgcctgtaatcccagctactcaggaggctgaagtgggaggattgcttgggccaaggaggttgaggctgcagtggctgtgatagtgccactgtactccagccggggtgacagagccagaccttgtctcatggtgtgattattacctgggcaactctttgctcctttctgaactgggaacaacacctgttctacctatttctcaggttataagtttcagtaaaagtcatttacttgtggcgaacactattctaactgttcttgtctattttaaaatgtgctttcacagaaactgttttcatttctggtcacacatacacacctggtgtgctcactgtttggcatattggcttcttcatgggcctcatccacattctcactttatttcttgatggctcatgtatttctctgtatagtaattccatgctgtgcctttctcctgtggaaacgtctggttccttcagtggaccttttctgggtagagatgcatcactctgcagggtgttgcttagaaggagtgagacctggagtgggagaagggaagaggaaagtaaaacagtttttgcagcgcagtatcaggagagagggatagtaactcaacacaggcctttcctgcccctgttggtggaagaggcagtaggacatttccagaaacccagaggagtccaggatatgtgagtctagaaacgctagtcatggcattgaaatcaattttttgtttgcatgaagaaccgggcatacacacactaattctccttggtttgggcattatctgctcccaagctgagtaaattcacaagcttcttattgacatcgcaggggaggatgctgaaggttactggtgagtttatactgcctttacatggtgtgaaagtcattattttactgtaataaacgttaaactgttcacaaagatatgcaaaggttgacggtgatctcaatccttttatgttgtgagtccccattctgccagtcctctaaggagggaaaggaactatgacccttggtttagatggctcccctcctccatgctctcccccaggagaccataagaaaacagaaggctgtgggaccccactggctataactaggaccttgggagtctgatgtaaatgtttacctattttttcccaaggaaacagcattgtcagacctgggaaaggacttagaaaaaagaaggcgaaaggacagattgcagtctccatcttctgtgtggcctcaggggacgaaccattgattaaaaacggaaggtcaatatcatctctgctgggtaaacttgagatccttgaagagcctctcagcccagtaggactctcaagccctgctctggagtgagcagaaaggagacgcagtggtttccccttgaaggctgatcttggcctgagctcatcattaaataagaagcgcgtagatctttacgctgcctgtgctgccctggtcagaaaggcattcgtcacagctccaggctttaatttcctaaagaggctaaggtgaaagtcattccaaggctctcttttcagaaaatgggaaatgatgttggccctgagtccagaatagcacatgggtgcctatttgcatagcttgatcacaaggcttgtctgtgaccactcctgacccctccatgctaactcagcctccatctgctgaacacagccagtcccttttctagggcagccaaagctttgttctgagatttcaaaatagatatcaaatattattatagctgcagtttgggatcatggccaacttagtggttataaacataagttctgaggtggccacattcccactgtggggtgggggtccaggagaagctcctccctctttgcccccacccaccatccctgagcccttgaccctctccccaaaaggatgttctgtggggctttgcatagttgtttgctttgaattccctgcctcctcacctgtcagatgagacataatcaggcgaagaaccaatatcccaagaagatggctctgaaaacagaatcaggtgtagcatggggaaccactggagacagcagatagtcactcatcttggcttgccccatccagtgtgaattttctgtgcacataacctcttcttggtgatttctcctgcaggtcctgggtcacctgaacacttggctctgggcaaacctgggagtggccaagacctgaagcaggaacagtcccagtccccatggtagaagatgcttccctttccagatccctggctggctgcatgctgggacgccggctggcttgttagagggtgcagccctgactctgccacaattttttgagcagcagttcccaaacttgagtgacattgggatctcctggagagcatattaaaacctggatccctgggacccaccccagagattccaatccagaagtcaggtttggggcctgagaatatgaatatttcctacaagttcccaggaaatactaatgcttgaccagggaccacactttgacaaccactggcttagatctctgcggtatcgagtaattaccctctgtctccttgttttctgaggacatcctcacactgtgagcaaactatgatctcaaaccatgggactcttttctctccagagttcatttcacaggtgttttctgaattgactcctggtggaacgtggaaaggaatacaagtgctgagttgtatgctaaaataacacttgccaccaaccgcagtagttgagctttgaattggtttctggtcaaaggtaatcatagatgaatggaagcaaaataattttataggctgggcgcggtggctcacgcctgtaatcccagcactttgggaggccgaggcgggcagatcatgaggtcaggagattgagaccatcctggctaacacggtgaaaccctgtctctactaaaaatacaaaaaattacccgggtgtggtggcgggcgcctgtagtccccactactccggaggctgaggcaggagaatggcgtaagtaaacctgggaggcggagcttgcagtgagctgagatggcgccactgcactccagcctggatgacagagcgagactccgtctcaaaaaaaaaaaaaaaaaaaaaagaattttatggccgggcgtggtggctcgcacctataatcccagcagtttgagaagccaaagcaggcagatcacttgaggtcaggaccagcctggccaacatggtgaaaacccatctctactaaaaatacaaaaactagccgagagtggtggcgcatgcctgtaatcccagctgcttgggaaggtgaggcaggagaatcacttgaacctgggaggcagaggctgcagtgagccaatatcacaccactgcaaaacagagcaagactatgtttccaaaaaaaaaaaaaaaaagaattttaggaatgaaggagaatttaaacttcactgtctagtttaactacctgtgaacccatcttataaatatcccatctcccaaagtccatttataaattggttgtttcatgctcagaactcatctcacgcaatcagggttctacgtgatggctaatggaatgtttagatcagttcacaaaagcttagtcaccccataacatggctgcaattcctaattttgcacaaaaacaaaaagtaggaaactaaattttattctaactttcacaagatgtttaaacatatagagtaaatcaaaagtttaccttctaggccaggcatggtggctcacacctgtaatcctagcactttgggaggccgaggcaggtggaccacctgaggtcgggagttcgtgaccagcctgaccaatatggtgaaataccttctctactaaaagtacaaaaaacaaaaaattagctggacatggtggtagatgcctgtaatcccagctactcttgaggctgaggcaggagaatcgcttgaacacaggagactcaggttgcagtgagccaagattgagctattgcactctagcctgggtgacagagcgagactctacctcaaaaaaaaaaaaaaaaaagaaaaaaagaaaaagaaaaaagtttctcttttaaaaaacaatcattttacaatgtgtcatattacaaataattaagataaaattaaatgagataaaatgtaatttggggagcttagtggatatcccaccagagcagccagcacacttttgagagctttagacagggactaagttcatttctgaacatgtagacttctagggcaacttggagaaatggctgattccagagctggcacagggaaagttcaagatgagcctggaacatcttatggtgccataagaaaagggcaaattctaaaaaggttggaaacattgaaaggatgcaggagctaatctgaaggggcttccacttaccacatttgagacaatatgaacattaacataagccaaaataaggccgggctcagtgggtcatgcctataatcccagtactttgagaggctgaggtgggaggatcccttaaggccaggactttgagacagcctgggctacatagaccccatctctacaaaagaaaaatttttttaattagctgggcatggtggtgcatgcctatagtcccagctactcaggaggctgacgtgggaagatcttttgagcccaggagttggaggctgcagtgagctatgactgtgccactgcactccagcctggatggcagagcaagaccctgtctctattaaaaaaaaaaaaaattaaaaaaaaatcaaaataaacaatgacagcaaaggattacaacccataaataaaagaagaatccatctgtccctgattatacacacatacactctttgtgtgtgtgtgtgtgtgtgtgtgtgtgtgtgtgtgtatatggcaactaataacaaatatatataaagtatacatacatatacattactagtatattgtgtatattatttatgtgtgcatagtagtatacattaacatactgcattatactacatagtataatgtaatctatatataaatggtaaatataaatatacattttcagtattttatatatgtgtgtatagtattatactacataacataatgtattttagtatattatggtatactaaattcatattttaatatattataaatctgtatattatgaataggtatacatgtgtgttattttagtatattatgaatatatgtatatttgtgtgtatttgtatatagcagttatacattattagttggcattctcctatgaagagctttcccttctggccaggtgcagtgcctcaaacctgtaattccagcactttgggaagccaaggcaggtggatcacttgaggtcaggagttcgagaccagcctggccaatatggtgaagccccgtctctactaaaaatacaaaaattagccaggcgtggtggcacacacctgtaatcccagctacatgggaggttaaggcaggataatcacttgaactcgggaggctgaggttgtggtgagccaagataggaccactgcagtccagcctgggcgacagagcaagattccgtctcagaaaaacaaaacaaaacaaaacaaaacaaagctttcctttctctcctatttaagtaataaatgtagatggaatgatgaagttagaaacatcaccatttggggctgggtttagtggctcatgcctataatcccagcactttggaaggccaagtcaggcagatcacttcaggccaggagttcgagatcagtctggccaacatagcaaaatcccgtctctactgaaaaatacaaaaattagccaggtgtggtggtgcacacctgtaatcccagctacttgggagactgaggcaggagactcgcttgaacctgggaggcggaggttgcagtgagctgagatcttgccactgcactccagcctgggtgacagagcgagactctgtctcaaaaaaaaaaaaagaaagacaaagaaaaggaaagaaaggaagagaaagaaaaggaaagaaagaaagagagagagaaagaaagaaagaaagaaagaaagaaagaaagaaagaaagaaagaaagagagagagagggagggaggaaggaaggaagagagagaaagaaagaaagaagaaagaatgagaaaagaaacatcaccattttgcagccatcatgatattgagtcacacaggaatcatcaatggatgttaaaagtagtgcatgaacatatgattaagaacagggcatttacatattctcaaaatattcactctcagattacttattaattacgaacagaaaaataataccttccagtggagaaacctggtggtcaccaccttacccaagagatcaatgttggtgccaccagcaatgggacatatcgatcttcaacgcactgtatagagatcagtgtactcctgtgctgttcctccccaaaatgcatgatctaaaatgaatcatgaggaaatatcagacaagctgacattgaggaacagcctacaaaagaactgttctgcacttttaaaaaacattaaggtcaagaaatgcaaataaggaagaaggaacagtcccagatggagggagggtaaagagtcccaacagctcagtgtaaatgtgtgaccctgaggtcccagactggaaacattgctgtaaaggacattattaggggacaaaggacaaaaattgaacatggactgtttagtaataacaatgtatcagtagttttcctgattttgataactgagcagaggttttgtaagtgaatttgtttgttcttagaaaatgctgtcagatactcagggataatggggaacatgatccatctgtcttagtctgtttagagttgctataaaggaatatttgaggccaggtaattttttttgagatggggtctcactctgtcacccaggatggtgcaattttggctcactgcaacctctgcctcctgggctcaagtgatcctcccacctcagtctcctgagtagctgggactacaggtgtgtgccaccacaccgggctgatttttttttttttttgtatttatagtagcgacagagtcttaccatgttgcccaggctggtctcaaactcctgagctcaagcaatcacccacgtcagcctaccaaagtgctaggattacaggtgtgagctactgcacctgaccaaggctgggtcatttataaagaaaaaaggtttatttgactctgttctgctggctgtagaagaagcatggcatcagcatctgctgagcttctgggagaatctcaagcttcttccactcatggcagaaggcaaaggggagctggctgtgtagagatcacctggcgggagaggaagcaagagagagtgagaagggcagagaccagctctttttagcaatcagtgcttgtggaaactaacagtgaggactcactcaccctgctcccaggacgttaatctattcatgagggattctccctcgtgcatgacccaaacccctcctgtttagtcccacctccaaccctggggatcaaattttaacatgaagtttggaggaaaaacatctgaactatagcactaactttactcaaatggttcagaaaatatgtgtatgtgtgtgtgtgtgtgagagagagaatgacaaaacaaatgtggcaaagtgttaacacgtcatcaaactgaataaagagtgtatgggcattctgtgcaccattcttgcaatttttctgagagactgaaattatttcaaaataaacaagtttttcaaagcacaggttttcttttttcctgatgtgggacaccactaaccctcttgtgctcagaggtcaccgtcagtatctcctcactcccagataaaatcaatgcgcaaactattttattcagacggcaaagcaatttctttgccttcccccagggcactgtttgtgctccttccaccttgaatctttctagccttgagtgtaagctctgttttaattcaggatttctttcttttggtcccatccaagatctttggcttagattggaaaccaggtcttaacaaatgggtgttaatgctcagatctcactttctgtttacactgtccagacacacccatagtcttgcactctcacctttgagtgataccagagtccaaggccattggtcaactaatgtgtaaccaggaccattagaatccagaggatgaggaaactagagatgggaatgtggaggcctggacctcaaactagtgctagtgaaaaagtgggcagccctcactcaagggaggacatggctttacttctcctgatctcagaagatcagcattacaagaagggaacagagagggacagagcatgtcatccctgtgcaggggcaggcagttcgctggcttgcatagcaaccctgcctgctgagcagacaggcaggagtagaagcagagggagaaggaagggaaaccttagcagcctggccgtgggcggaggtgcaactccatccacccacaatgagatggtgttgatcagtcctccctgtggccaacagctttgcactgaagcaaggctggtcctaactacacagtttgttgtctgtggaacctgttttctctctggatcaagacaactggtcccatagagatgttcctaccacctggccatgttaggctactgttccaattctgggtccacaaagaacaatgatttcagaggccccctagatccttttgcactcctgctgccatatacaaactctctgggaaagatttatacttaatgaggagaagagtctaaaacatgctcaggaactctcactgcgcaatttcatctcctttaatgggcacatcttttttttttttttttggtggtcttgtttcttgacccattgttatttcaccactgtcttttctcccatatagataatcattctgaaaatgtactcagtggaaaaataaaaacacaggggaaaatgaacacaaaagtcttacctttccaagcaggcgctataaatatttggcttcattttcttctagtttctctaccaaaattttgttttaaatgctcacatgttagatgagtagattcttgttctacaatattgaaatgataaatagctaagtatccttagagaggttttggtgtgcatttacaaacatatgcttacatttaggaatttaaagtttcatggtttgttacaaaggtgctacaaattacaaaattactatctatagatctaccttggttttcaaaaattgctagagtatttccatattaacataccatgttgacctgaccattcctccttttttttttttttttttttgagatggagttttattctgttgcccaggctggagtgcagtggtgcaatcaaagctcactgcagccttgaactcctgggctcaagcgatcctcccacctcagcctccctgagtagctgggattacaggtacacaccaccaagcctggctaatttttttttaaattatactttaagttctagggtacatgtgcacaacatgcaagtttgttacatatgtatacatgtgccatgttggtgtgctgcacccattaactcatcatttacattgtatatatatcctaatgctatccctcccccctccccccaccccacaacaggccccggtgtgtgatgttccccttcctgtgtccaagtgttctcgttgttcaattcccacctatgagtgagaacatgtggtgtttggttttctgtccttgcgatagtttgctgagaatgatggtttccagcttcatccatgtccctacaaaggacatgaactcatccttttttatggctgcgtactattccatggtgtatatgtgccacattttcttaatccagtctgtcactgatggacatttgggttggttccaagtctttgctattgtgaatagtgccacaataaacatacgtgtgcatgtgactttatagcagcatgatttataatcctttgggtatatacccagtaatgggatggctgggtcaaatggtatttctagttctacatccctgaggaatcgccacactcacttccacaatggttgaactggtttacagtcccaacagcagtgtaaaagtgttcctatttctccacatcctctccagcacctgttgtttcctgactttttaatgatcgccattctaactggtgtgagatggtatctcattgtggttttgatttgcatttctcttatggccagtgatgatgagcattttttcatgtgtctgttggctgcataaatgtcttcttttgagaagtgtctgttcatatccttcactcactttttgatagggttgtttgattttttcctgtaaatttgtttaagttctttggagattctgcatattagccctttgtcagatgggtagattgcaaaaattttctcccattctgtaggttgcctgttcactctgatggtagtttcttttgctgtgcagaagctctttagtttaattagatcccgtttgtcaattttggcttttgttgcctttacttttggtgttttagacatgaagtccttgcccatgccaatgtcctgaatggtattgcctaggttttcttctagggtttttatggtttttggtctaatatttaagtctttaatccatcttgaattaatttttgtataaggtgtaaggaagggatccagtttcagctttctacatatggctagccagttttcccatcaccattaaatagggaatcctttctccatttgttctttttctcaggtttgtcaaagatcagatggttgtagatgtgtggtattatttctgagggctctgttctgttccattggtctatatctctgttttggtaccagtcccatgctgttttggttactgtagccttgtagtatagttcgaagtcaggcagtatgatgcctccagctttgttcttttggcttaggattgtcttggcaatgcgagcccttttttggttccatatgaactttaaagtagttttttccaattctgtgaagaaagtcattggtagcttgatggggatggcattgaatctataaattaccttgggcagtatagccattttcatgatattgattcttcctatccatgagcatggaatgttcttccatttgtttgtgtcctgttttatttcgtcgagcagtggtttgtagttctccttgaagaggtccttcacatcccttgtaatttggattcctaggtatttctctttgaagcaattgttagtgggcattcactcatgatttggccctctgtttgtctgttattggtgtataggaatgcttgtgatttttgcacattgattttgtatcctgagactgtgctgaagttgcttatcagcttaaggagatttggggctaagacgatggggttttctaaatatacaatcatgtcatctgcaaacagggacaatttgacttccttttttcctaattgaataccctttatttatttcccctgcctaattgccctggccagaacttccaatattatgttgaataggagtggtgagagagggcatccctgttttgtgaagcctggctaatttttattttttaatttttatttatttatgtatttattttttgagatggagtcttgttctgttgcccctgagctggagagcagtggaacaatctcagctcaccacaacctgtttcctgatttcaagcgattctcctgcctcagcctcccaagtagctgggattacaggcacgtgccacagcgcccagctaatttttttttttttttttttttttttttttttgtattttcagtagagacagggtttcaccatgttggccaggctggtcttgaactcctgacctcaggtgatctgcctgccttggcctcccaaagtgctgggattacaggtgtgagccaccatgcccggcctatttttaattttttttaatagaaactgggtctccctatattgcccaggctggtcttgaactcgtgacctcaggtgatcctcctgcctcgacctccaaaagtcctgggattacagacatgagctaccacacccagcctaccctcttcttgaaacatgttcttctcttggcctccaggacacgctcttgatttccctcccatctcacaggctatccttcttcgtctcctctgagatttctccttatccattttttttttttttgagatagagtttctgtcttcttgcccaggctagagtgcaatggcacgatctcggctcactgtaacctctgcctcccaggttcaagcaattctcctgcctcagcctcccgagcagctgggattataggcatgggccaccatgaccggctcattttgtatttttagtagagacggggtttctccatgttggtcaggctagtctcgaactcccgacctaagactctagactcaaagagtgagccacgtactgatcaaaatgaatctgaatttaaaataacatctatacctaggtacctaacaatgaaagtttacactatcaagaaaaagatctttttaaaatctaggaaggaaaactgatcacaaaagaatgaaagcatatgagcataaaaattaagtccttctggtttccacactagctctgacatttatcagctgagtgaccttgggtatgatactcgaccctgctgtgtttccattttctcatctgtaataataataaacataacaataatcattatttttctgagacggagtctctaggctggagtgcagtggtgcgatctcggctcactgcaacctccgcctcccaggttcaagtgattctcctgcctcagcctcccaagtagctgggactacaggcacgccaccacgtgcagctaatttttgtatttttagtagagatggggtttcaccatgttagccaggatggtctggatctcttgacctcgtgatccacccacctcagcctcccaaagtgctgggatgacaggcgtgagccaccgctccccgcctctccttatcctttagagttcacaatactggagtaccttggggctcagtctccagaactcttctcttcctttttaacgtgaaaccaaagtaattgcatccatatttgtagctttaaatccacctatatgctactgacttccaaatttaagtgtccagcccagattcctcccatggatttcagattcacagatccacctgcctactcagcatctccacttggaagtttaatttaaatatcagatttaacaagtcccattttgaatccctgatttctcccccaagcctgtgcctctgtcattcttcacgtcttagtaaatgacaacttcattcctccaagtatcaaggcctaaattgttggtttcatccctttttctttttttcatattccacagttacaaatcctgtcatctttttcctcactgcctccacccctactaacctagtccaagccaccattatctcccacccagactaacaatctcctcacaggttgtttcagttcgctatttctgtgtaacaacttgaaatttagtggctcaaagcaacaacacttcatttattatttcccatgattctgtgggttgatcaggtagttacacagcttgatgtgatgtcatttggtgcactaggatggctggaaggatgagtatggcctcactctcagggctgggatttgaggatgactatccagtggaagctcagctatagctgttggccagggaccttgattcttctccacctgggtgtcacctttccacataactgcttgggcttcctcatagcatggtggctaggttctaagtgggaacattccaggcactgaaagagaaactgcatatttcttaaatcacagactagggaaccacttctgcacattcctttagtcaaagcagtcacagaatctgtccaaagttaagtagtgagaaatagtatccagctttcaatggaaagaggcaaagaatttgtggtcatcattagtccaccacacaggtctctctgcttctaccattaccccacataacttctagacacttccttttaaaatcataaatccctggccaggtgtggtggctcatgcctgtaatctaatcccagcacttggggaggccaaggcgggatgaccgtttgagcttggaagtttgagaccagcctaggcaacatagtgagaccacatttctacagttttttttttaattagtcaggcattgtggtgtacacctattatgccagctactctggagactgaggcaggaggatcacttgagcccaggagtttgagactgcagtgaactctgatcacactactccactgcaccctgggcgacagagcaagaccctgatctcaagaaaagaaaaaaacctacaaaaataaaacataaatcttagagctcatcaacagcttctcctctcctggctaattagacaacttaatctgacccttgccccttctcctggcccctctctcctgcttcctccatgcagtccacgttagtctccactgtttcccaacttcaccattcacattcctgtctggaggccctggcagtggctgtttcctctgcctgaatcccatggaccttggcacgcataatcacttccttacttcccacaggcgtctaatcaaagagcatttcatccaaagggcctttcctctctagaataagcaaaactaattaatgccagtaggagaagaatgcggtgtctctgggtggaggagaaattgcctggaagggacctgagggaactttctggggtaatgaaaatgttctacattttattttgggtggcaattacacggatttttttctgttgtctattgctgcgtaacaaattgctcccaaatttagttgaagaaaaccattattttctacctctcgggatttctgcagtataggaacttggacagggcacagtggggacagagtgttctgtgatgtctggggcctcagctagaaaacttgaaggctacgagctgcgattatccaaaggctcatttattcccatatttggtagttggtgttggctgtcggctgacctcagctgtggccagaacacctacttacacatggcctgtccagggccacttggcttcctcacagtgcagttgggtgggttctgaggataagcatgaggttggtggtggtgtgggcggggggggtgggggggtgggtggatggagagagagagagagagagagagagagagaggaagcacaggcaagcatgtgccaggtggaagctgtcttgcttgtctaacctagtctcagaaatcatatcacgtacattgtatgcattgtcaaaagttgccaagaccagtctaaaatcaagggatggggccaggtatggtggctgatgccataatcccagcactatgggaagccaaggcggggagatcacctgaggtcaggagttaaagaccagcccgaccaatatggtgaaacacaatctctactaaaaatacaaaaaaattagccaggcgtggtggtgtgcgcctgtaatcccagctactcgggagactgaggcaggggaattgcttgaacctgggagacagaggttgcagtgagccaagattgtgccactgcactccagcctgggtgacagagcaagaccccatctcaaaaaaataaaaataaaataaaatcaaggaacgggatcggaatagtgggaaagatgggaacagtgtcatagaattttcagacatgttttaaaaccaccacaggtctgtaaaattgtcacagcttgtcaactgaacacttaactgtgcatcatatggtaggtcagttacactccaatttaaaaaatagaaaaatggggctgggtgtggtgggtcatgcctgtaatcccagcagtttgggaggctgaagcaggtgaatcacttgaggtcaggagtttgagaccagcttggccaacatgttgaaaccccatctctactaaaaatacaaaaattcgccaggcagggtagtgggaacctgtagtcccagctactcaggaggctgaggcaggagaatcacttgaccctgggatgtggaggtggcagtgagctgagattgtgccactgcactctagcctgggtgacagcatgagactccatctctaaataaataaataaataaaaatagaaaaatgggccaggtacagtgacttatacctgaaatcccagcactttgggaggctaaggcaggaagattgcttgagcccaggagttcgagaccggcctgggcaacaaaacaagacctcatctctacaaaaaaaaatttttttaaatgtagtcgagcgtggtggtacaagcctgtagtcccagctactcggtagctgggactacaggatggcctgagcccaggaggttgaggctactgtgagctgtgattgcacaactgcactcgactccccagttatggtcactccccgtccctttgccctgttttattttagttcgtagcacctatcacaacccgtcacagcatgatatattgtcttttccacctgtttgctgtctctctctcccccaacctgccaccccaagaagactgtaaaatctatatgagcaggcactttgtgctgtccacccagcacctacaaacacatctgatgcacatcagctgcttagtcaggagttgttgaaggtaattaaatgaatggagtaactccaggaagggaggcggagcctacatagctgaaaaccagtggcaatcagaccattgataaataacagttatcagtgcgttaaatgcagatcaccaatgtcacaggcattgagacaagggagagagcatctcatcctgactcatgagagctggaaggctccttagaggtgactcggtttagctcctcattttctgggtgagggtagtgggatctaaagaagatgagaggctcgttcaaggacatacagcagcaggcttagaaggcaggccatgtgacatgggtcactagcaagagctccaggctctcggtcttctgcagcagggctgcctcctccgtcaagtgcagcatcttttaggaaaggagtgttcctagcctggcagtgcagttaggtagaaatgaatgagatgtcagaaacaatattgactctgaattggatgttaaaagtcaggctcacactttgagggttgtctttgtactagacagaaggaaaatgcattttctttggagttttaggtcatttgttttaccttttgtggtaggatcagccacataaaaatattcctcatctttgggtgtcataatatccccttttttttttctaaccataggctaacgtgctctctgtaaaaggtagtgatttctaagctggttctctttaagcaagtgattccatgataaacagatagaaacgtgttcctgccattcactggaacctttgttacatttctgagagcactcattaatttaaggcattcttctattgtgctggactaaattctacactataagcagctcccacattgtcaaccatagccagataatgactcatttttgcataatacaagtgtcccattccctgttttagttattattcaagtttattgactgattctatttaagtaacatgtgttaggacaaagaaacacactagtccaggtggaagactcatttcagaaaagagtatggggattcacagaacagtgcaaatcaggtttttaaaaaatagaagaaatgagaaatggtgcttaaacacgttgtatactaaattcctaatgtattttctccttcaaattgatatcattgtcttactaagcaaaattggccgtcggtgatttaaaaaatgcataattcttctcccctcacccccctcctatctggttttaatcttcatgactagcattaccttgaagaaaccacagctgagcccaggagacattatggaaccaaatcttgcccatgatgatactactaacaggcacagacttcattcaaattcagcatcacccaaatagatgatttaagttgtttgcttaagcaatgaatgaataatgagacgggatgggttgcatttttctttttctttctctttgtaattgtcatgaaccatacattccaattttccagtttgtgcttcagttaaaatcacatcagtccactgagtttcttcaggctctctaagagcctctgctggtttcctcccttttcaaaggcagtgactctcagccatcctgcagagacagtacatttgtatctcctacaaagctttgcttatagtagatgctcaccaaatgtttgttgaatgaatctttgaagagagaatgccctctgtactcccctcctttcaaaaaacaagatttctgcctgggcgaggtggctcacatctataatcctagcactttgggaggccaaggcgggtggatcacctgaggtcaggagttcaagaccagcctggccaacatggtgaaaccctatctctactaaaaacacaaaaattagctgggcgtagtagcgcacacctgtaatcccagctacttgggaggctgaggcagaagaatcacctgaacctgggaggctgcagtgagctgagatcacaacactgtacgccagcctgggcgagagagcgagactccgtctcaaaaaaaaaaaaagtaaaataaaaataaataaaaagaaaagggggatttctaaaatcctagaaacatgtttggtatggctctccttagagacaaataaaatttcaagatggataatgtctgtgaaatttgtcttaagaaggtagtgagtcacacatccatgctgatgcctaacctagatcctgttgatcctaaccctgaccttttggttggtcattgtgtgtcattggccacatggaaagccaggcaaaaagcagcaccgggccagcctaagtccatttgcagccctggaagcactgtcatgtatggctcagttgtggataagcaagtggttcaatggtgagtgagcaagtgaagcaagcatttaccaggtcagtggaaggccaagtctggaaagtgaaataagggcagacagtggagagccaaggatgctagactcgggagtgtgaattccaccctacagataaccagagaggcttccacatttttttaaaaattttattattattatactttaagttttagggtacatgtgctcaacgtgcaggtttgttacatatgtgtacatgtgccatgttggtgtgctgcactcattacctagtcatttagcattaggtatatctcctaatgctatccctcctttttttttttttttttgagacagagtcttgctctgtcgcccaggctggagtgcagtggcgcaatctcggctcactgcaagctccgcctcctggtgaggggtgacagcgtgctggcagtcctcacagccctggctcgctctcggcgcctcctctgcctgggctcccactttggcggcacttgaggagcccttcagcccaccgctgcactgtgggagcccctttctgggctggccaaggccggagcccactccctcagcttgcagggaggtgtggagggagaggcgcgagcgggaaccggggctgcgcgcgcttgcgggccatctggagttcccggtgagcgtgggcttggcgggccccgcactcggagcagccggccggccctgctggccccgggcaatgagggacttagcacccgggccagcagctgcggagggtgtactgggtcccccagcagtgccagcccaccggcgctgcgctctatttctcatggggccttagctgccttcccgcggggcagggctcgggacctgcagcccgccatgcctgagcctcccacccgctccatgggctcctgtgcggcctgagcctccccgacgagtgccaccccctgctccagggcacccagtcccatctaccacccaagggctgaggagtgcgagcacacggcgggggactgggggactagcaggcagctccacctgcagccccggtgcgggatccactgggtgaagccagctgggctcctgagtctggcgggaggtggagaacttttatgtctagctcagggattgtaaatacaccgatcggcactctgtatctagcccaaggtttgtaaacacaccaatcagcaccctgtgtctagctcagggtttgtgaatgcaccaatcgacactctgtatctagctgctctggtggggccttggagaacctttgtgtctatactctgtatctaactgatctgatggggatgtggagaacctttatgtctatctcagggattgtaaacgcaccaatcagcgccctgtcaaaacagaccactgggctctaccaatcagcaggacgtgggtggggccagataagagaataaaagcaggctgcgagccagcagtggcaacccactcgggttcccttccacagtgtggaagcgttgttcttttgctctttgcaataaatcttgctactgctcactctttgggtccaccgtgcttttatgagctgtaacactcaccgccaaggtctgcagcttcactcctgaagccagcgagaccacgagcccaccagaaggaagaaactccgaacacatccgaacatcagaaggaacaaactccagatgcgccaccttaagagctgtaacactcaccgtgagggtccgcggcttcagtcttgaagtcagtgagaccaagaacccacccattccggacaaactgggttcacgccattctcctgcctcagcctcccaagtagctgggactacgggcgcctgccaccgtgcccggctaattttttgtatttttagtagagacggggtttcactgtgttagccaggatggtcttgatctcctgacctcgtgatgcgcctgcctcgacctcccaaagggctaggattacaggtgtgagccaccgtgcccagcggcttccacagtttttgacaatggcaataatgctcatggaggccactcctataatcaccaagcagatatttaggaaaaatggcacgagtactttggaaaacagtttggtagttttttacaaagtcaaatatacactattatgcatcctttattcccatttgttccaaagaaacgaaaatgtatttccacaaaaagacttgtgcatgaatattcgtactagctttattccaaaaaatccaacagcccacataaccatcagtgagtaactgggtaaacaaattgtgttacatctatacaatgagataccacacaacaaaaacaaaacaaaaccccaaaaccaaaaaactactgattcacacaacacaggtgaatctgaaaaacattatacttaatatagccagatataagactataagtagtatgacttcatttacatgaaactctaatgaaactaatgtatagggacaaaaagcagatcaacggtcacctgaggctagggctagggaggtagtttctaccacaaagaagcaaaagagaccttttggggtgaaaaaattgttgtatattgtgattgtagtggtggttgcccaagagtatgtatacatttgtcaaacctcattgaactgtacacttaaaatggatgcatttcaatatgtgcaaattataccacaataaagttgactggttataaaaaaaagagaactatatttgggcatagctttacacaaggccaaggggaggaaacagaagagactttcctagggtgtttatggtttagtacgaagctgaggtgcagatccgtggcacaaggccctgcgcttaggaacaatgggtggcagaatggattaagtggccaaagaagcctatggacaagaaatacagaaggaggcagagagaaagagacagagagagagaggtgagggagtaggtccaccatggcctggagttaaagaatgatacatcattttagagaaggtcttacttatttcactcttccatcaaggcctgttcaaatcccactttcttcgcaaattcttgcttgagtccctacccacagcaaccttttcatctttccctcttttgtactcttatagtaagttctgtttaatttatgtgtaaatagctctttaatagctgtttaatttatgtgtaaatggcctcttttctcttgaactgctattcaaattgcttagtgctaatttcaaatgtgcttatgccttatctaatatctagaacacaagttccttaagagagtcctgtaccttggatctccccatagttccttaactacagcagctgggcagcttttgtagatgttcttgattcatcaattttcagttactaaaactggactgggttaacattttggggtaaggaagataaacctacaattctattatgattgtacctagggactaagtagggaggtattgtggtttgtgaacccgttggtaattcattccactcctcctttaattgacagaccatactttctatcacaaagccaagaccctcttcaggcaaaggcttctgtgaggcaaactgaaattgagttgatatagttaccccatcccatgattttatacgtcaattttttgtttgttttgtttttccaatcaggaatttcagccagggcagtcacgtttgtgtattcgaagcctgccaactctgaccagaaatcaggtctccgtttaagacacaacttgacaagtggattacatgttctggtgaaaggcagataaatgtcactcatgtcactataaataaaagtctgggcctgcttatcagcttgtagggttgaggtcttaccttcaacacttctcagagtgctttatactttattatcctttaaacgaggtcttttccatccagcttcttccagggaattattactgttcagctctttgaaacatatggctcctgtcaactccctgtcttttcctttaaggaacaatacaacctgtggccttaaacagaaatctgccagaattttctcaaatgtcatattagagaatgaaatgtaggaagacctttcatagtaatggatctaggacaccttccatagtaatggatctaggatcttgtacctgctttacaagcaaatcatgttctagcaggctttggttgcttggggttatggtttagagcatgggattggtcatctaaatccatgtaataacaagtatggtttgcaaaaaaggattttcatggttagagaaatttagaaatgcacaatcaaaaaggctctaagatggttgcagaaatgtagtctgtttagctcgatttaatccagaattctcaaagttatttgaccacagaacctccttttcacgtatttttggatacactactcacaaaaatgtttttgagtgacttaaggcattaacacagattgagaaagtttagaattgaattaaataatcttttctttctttttttttttttaaatttgaggcagggtcttgctctgttgcccaggctggagtgcagtggcacaatctcggctcactgcaaccttgacctcctgggctcaagctatcctcctgcctcagccttccaagtagctgggactacaggcatgtgccaccatgtccagcaatttttgcattttttgtggagacagggtttcgcctggtctcaaactcctgagctcaagtgatccacccacctcagcctcctgaagtgctgggattataggcatgagccacggcaccaagccagaattaaataatctttctacatttatcaaagtacacttattgaggccctaaaaaagcacatttttgtgtctatatatctgtattacatttctgtacacttctgagctatattctaaagttcaatgaggatagaactggatatacacaaaagtgttttgtacatttgctcaccaatgtcatgttcatttgtaccagtgaattatacttggtgataatgattgcagactgttttaggtaacaaggaacatttgagacaagatctgaatataacaaaatcctggaaatgtgaaaaattagctttgggtgggttctaggaggagaaactcgtagattccacttccagttttacattctaagacagaggttctcaaatttttggtctcaggactcatttatactcttaaaatcccaaggagcttttgtttaagtggattatatctattaacttttactatgttagaaatcaaacctgggaaaatttaaaaatacaaatttattatcttaaaaataagaaacccataagatcttaccataagcaacatttttgtgaaaatagctatatttttgcaaaaagatcagtgagaatattggcattgttctacatttttggaaatcttttcaatgtctggtttggtagaagacaactggattgtcacatctgcttctgattcaatttgctgatactgcatgtcacagagtctctgaaaaatttcactgttacacttaagaatgagaacaaaaagggtaaataacatcctactattatgaaaatagttatgacctcacagaccctctcagagagtctctgaggcccttggggtctctgaatcacactttgagaactactgctctaagaattcaattcaataaaagtattatatttattgagaacctactggatgctcaccacaagataaatacaaagacatgtcctcgcctccaaggaacctgcagtgtccccttccacacctcatttccaaccaaatcttaatattccaagactcagtgtcattccataatacttcctccttgtcatttttttatcccattagatgacaagagctctacttttttcctaagtgtctgtagcaattattatctgtgcaattcatttgggattttgatcaaacaccacagagggagacttattattgatcaaactgtgacttattaatagttcatattttgtggttgtattttgtccttgctactgatggtaggctctttcagagcaataacttattttacttatggtgctcaaggtaagtagtgaagactgtggatcttacaccggtatttagtagtttgatttgcaactattgagtgtggcagagacaaagctatgtgctcaccaatcctatttccttttcctgttcttgagcactcagactccttcccagtctctcctgcaattgggttagggccatgtaactgggtttgggccagcagaatataagtcaccacgaagcctgacccttaaaaacacccagtgcggccctcctgccctgtcttcccttttggtagtgactgtggtggccacgttgagctggcagaatcccaggatgaaaacagcaggatgcccaagtcatcacatggaagaccgctctggagagtagcctgataccacataaactaagctaatgaggtttcaggcattacttgttactacagcaaagcctaccttatcctggaatattagtggaaaaagaatgtccataaatgaaataggaaataatgtaagacacaatactatgtacgaaaagagtcaggagtgatgtggaagatgggagtgggcaagagtcagtttgggctcatgtgctgggacagactttatggagaagaggggaagagataatttgaatgagtagaatttgagttgtaaaaaaggtggtgggaagactatgagtctcagcaaagtgggaatgagcaggaaatataagtgagggaaaatgaagacagagtcaatatgagaaagttaacaccgtaacagtgtggtggcatgcctgtagtccaagctacttgagaggctgaggtgggaggattgcttgagtctgggagatggaggttgcattgcgccactacacttccacctgggttacagagaaagatcctgtctgaaaaagaaaaaagaatgaacgcacgagagaaagaaaaagaaagaaagaaggaaataaagaaagaaacagagagagaaagagaaagagagagagaggaaggaaggaaggaaggaaagaaggaagaaaagaaagttaatactagctggggagtggcaaaatgaggcctgttagattattaaattgtccaaaataagtggaacatgctaataaaattgtgaggcttcttcaaagcaaacagtgtggagcacaacagatagccatacaatggtgatcacttcctggttcttagcaagttttggcctgtgcactgggcatggtatcactgaattttcacagaaaacctatgaagtctatgatcctcattttacagatgaagaaactgaagcttagagaggtgaagcatcttgaaaatgcattagtcagaattctcctgaaaaacaggaccaataggatgtgagaaggttttatttgaagaaattggctcacacgattgtgggggcttgatgagtccaaaatctgatggggtaggccagcaggctggagacccagggaagaggtgcatctgctggcagaatccattcttgctcagggaaggtcagtctcaggggctgtagtgctgcagtgtccactttcaggtggtgcctgcacatcatgcagaaccacctgtaaaccagccctgagctttctcttctctacattaaacccaagtaggcctggcatttctcactcactcactgtggtctaccttttggtccatgtttcagtcaaccaacccatcagttatagcactaactccctgagttgcaacattaaatgcagaaatcttgctcaatcggcccctatcaatatattcagcctgattcaattttatgtttcttccatctttatcccacacctttaatttccattctcacacatattccctgaatttctgactaaataagaaaactcaagtagttcttttggagtgtagtatgcctcatggatcacatttcatgcctcaccttttgggactgctaggacttgagtctagttaaagttctagaagccaagaggggtaatgggggtgtgtcctgaggagaatcagcattgtcttgcgagacaactgtatcaggtgaggtcatgatagattccttaagcaatgaaaggttagttccctcaggtgggggtggagaggatatatctactggggtggagaaaatgcttctacgggcaaagatgactcattggaacttatgaattcaatgtccccagtgccatcaaggtctttccatatgcccccattccaactttcaggatccaattcgttcccaatcaatgccctcactttagaagtagacaacctgcaaagtcaaaaattcaatctgcactttaattcagccacttacaggatgtgattcggagttgatttttaacaatcttggctctgcagctataggagataagggtctctttcagggcagaaatagaaagtttcaggtcacttatgttatacttgagctgggaatttgaatccctgagctcatccttttcttttcccactttgtccagcaacattaggggcaaccaatctcattatacttgttattttggcaaatatgttataaagtatcatacgcatggtcacccagatcctgcttctttttagttttggtaatattttgtgtaattctactacttcatcatgccatagactatcaagtgttttatttactactggaaagtcattcctgtttttaatctaatcagactagagaaccacttccagaaacctcagaaccaattacaaaaatgcatccctaagattccgttccgcttgaaccacttctagtaccagaatctgtagctgtcagcgttctctagagacatggaatcaacatgtgggcatatacaaagacatttattataaggatttggctcacgtaactatacagactggctaatccaaatctgcagtgtaggccagcagattcaggactcaggaggcagattacatctcaaggcagttggctagagaattccctcttgcttgggggccagactttttgttctattcaggccttcaactgatgaaatgaggtccactcacattatggagggcaatctgctttactctactgattaaaaatgtttatctcaacccaaaatggccacaattactgttttaaatacatcaggttattcacaatgaattttgtaaggataaagaaggaaaggaatcacttggtagaaggaccaatagtaggcaaaaaaaaactgagaatttttttctatgataattacaatgttaatggggcttaaaaatgaattgatgaatatttaaaaacatcctagtttccacatattatatatttttcatattgtttttcacattaatgtaatccagatactagctgtggccttcctctctccctttgagatctgggcaaaaatgtttcaaaacctctgggttctctgcctgtataagtccaaagtctggttcagtatttctgctaatttattttctttttttttttttttttttttttagatagcttctcgctctgtcacccaggctgtagcacagtggtgcaatcatagctcactgcagccttaaactcttgggctcaagtgatcctcctgtcttagtctccccatttgctaggattacagatgtgaaccaccacacctggcctccctgctaatttccaacactaataaattctcacctcttctgcttctagaggtctgctatgttgcccaccccgtggtggttccaaaccacagtgaccccaactggagactttttatttgatttctacaagaaaaacccataccaagcctgagtctgacaggctttactggacacattgggccagggaaagtgtcacaatacttagtccatatcctcctgccgcctttcaagtttcttctctcttttacccactccttctctgagtgccaaaactccaattttagtacttctatgcaaaccaatttcaccacccaggtgaattagcttgcactccccaaattttgttactggactctttcctttgtaagggataagaatttagcccaagccagcttagggcaaaaggaaacttttggctgggagtggtggctcacacctggaatcccagcactttgggaggccaaggcgggcggatcacaaggtcaagagattgagaccatcctggccaacatggtaaaaccccatctctactaaaaatacaaaaattagccgggcgtggtggcgcacattggtagtcccggctacttgggaggctgaggcaggagaatcgcttgaacctgggaggtggaggttgcagtgaaccgagatggtgccactgcactccagcctggcaacagagtgagactctgtcttaaaaaaaaaaaaaaaaaaaaatttggctcacagaatcaaaggacagacttaatcaaactgcaggaagagagggatttaactggaaccagggaattaaccctgcttctctcattgcctactggcaacaagtcccaattcttatcttttagcgttcacgcactggaaagatgcagtcttaaatttcttatggttcaaagctcaaaaatgctggtaaggctgggtgcagtggctcacacctgtaatcccagcactctggaaggccgaggtgggcagatcacctgaggttaggagttcgagaccagcctggccaacatggtgaaaccctgtctcaactaaaaacacaaaaatcagcggggtgtcatggcaggcgcctctaatcccagctactcgggaggctgaggcaggagaatcgcttgaacccgggaggtggaggttgcagtgagcctggatcttgccactgcactccagcctggatgactgagactccgtctgaaaaaacaaaaacaaaacaataaaccctcccaacccgccaaaatgctggttaaggattctaaatggctcaacttggccagctgtctatccctgaactgcctatggtgtacatgttcctataacagcacctcccagggaaaccagaggggctgcttccaggtaaaaggaggaatttcaccatagacataatactttggaatagttttggctatccttaagtaaaacacgggatgactatttctctaatttccacactagtagtttaaacaaagtagtcatcagaccacagaggagggggcaataaatactgcctgtgaggtaactcggcgaaatactttcacagaggcctcatgaggtgagcatttagcatcgtgtgtgatgtgtgtcaaaccaagaggggattcagggagacttccaggcttgagcaaacggacaaatatacctcctcttccagacctctcctttcatatggaaaaaattcgtttgggaccaccagaaaacaaaagataaaagtatcgtgttagaacaaggatggattaaaaatgacctttgcttgaactgaaacagaagctatgtgcataagtgacttaactcctctgtaacttggctttcttatcatttacacgagggtgctaacagtaccctcacaaggttcaagtgaagattacataggacaatcccttagtcaatgtcttggtacactgtaaaggctcagtaaatgctggaaaatcatattagcaactattttatacccgtaattgtagctggaagattgtattggatgctaaataccggctagattccattcggtaactatcataattatttatttgcataacaatcaaattattggtgcaaagcagccattattactgtaaaatgctttaaaatgctccttttgatagtccaggtacgtactgcagcacaaaactaggagaaaccaggaaatggaagtaacgagtaagtttggatgcttcgattctaccctagattgagacgggtgagcatagaggcaaaaaaagacattttcttccaaacaagaggtgaccaaacgggcaagggagacctcctcccgggcatgcagagcgcagcgattctgtgcccagggagccggagggctggggctgggagatcccggcggagccccggcagagcagtcgcccgtgagcccccgcaactcagacgcgctcggcctcgcgctccggggctgggaccaccgagggcgagctgcagccttcgccacccggtccgccgccggactccgcctcccacaaacagcccggcaaggcccttttccgccgctccctcatccagcgaagcctccttcccagcttccccggcggcggcgccgtgacgtcacttccgttctccagcgcgcacgtgggaggaagtgctggtgccctctgccgctgctcccgtctctttggttacgctcgtcagccggtcggccgccgcctccagccgtgtgccgctatgggagtcccggcgttcttccgctggctcagccgcaagtacccgtccatcatagtcaactgcgtggaagagaaggtgaggaggcgccaggcggccgccacactcgagcccgggcccccggcacgtctaggccgcggcccatgggctccgccgcctgcccccggggagccttgccggagctcgcgccctgctgccagcctcgcgagcagtcgcagccccacacgcgatgggacgcgggctgtgggattcagcaccccgggggcgaggaattcaggaccctcggcggggcaagggcctatagggttccgaactcgcaggagggtcgctcctcccctactcgctttttcccggcaccggaaggccccgcccactgctttgtttcctctccagaccgcgcattttgggtctcggaagaggttcagaggctgttgttgagcaatgcatgccaggtcagctgagctagcgggttatggatgcacggattcggaggccagctttttgacaaccttgtaaaggaatccctggcggcgaccttttcgttgtttaccaattgtgccggaaaggttttctcctagtgttcaggaccatttgttgttctggttagattggacgctgaaagcagtatgtcaggtccaggatgagcgctatagaattctgagaagttacccttctctgtgtgccctgactactgaacggggtgggtgcttgttgaaaatttcaagattactggatgtacttgagcagtacaatttttgttgttagttaatacgtaagtagatttttggccattattgagttttgtttttattgttttcgtcattccatgcggattcgattttgtgctcttaattagaatttctggattggaaacgttcagaggcacatcacgcgtacctcactccttagtttttgaaggcagtgcttgcctgtcactgtgaacttatttctgcttttttttttttttttaactttcttggcttctatccaaggaggaaccaaaagccttgtcttagtgacattcccactatttcttgtttttttcaaaaagcaactgctaaattgaatacttgtttcctttgtaaaattttaatcgaactttattgaactttacttgcacgtgggttaaacaaaaagcaacagttcttgctctaccccttctcatcccatttctccacctttaactgttttggttctgtctctaagtatcatacttatacgttatcacttttagatctgttgaattctagctggaataggagaggatttagtcacctattcagccctccctctatactcttaatggagtaaatcactagatatatatttttattggtaagctttataactaagtaatttgcctttttcattccatcgcctgtgtaacgtatcccttgactcaatgctttctaaggtcgatcttagcttttcttccctttcacctcaagtttgtcagctgtacttttgcgttgtgggcatccaaaattaaatgatcagggctttgactatacagatttaaaatgctgaaaaatcagataggatagttgactattgacactgtgtagattcaggttatgtactgtgattttgttttttgtgctgcttttgtctttttccctggggctgtctttctttttccactttacatcttgccgcgcccggactctattttaccaggtagtctatcaagagtcatctttcttcttgaatagtccttcttggggtcttatttatttttgttgctgtcacacctggctattctgtaggcttgctggaaagctgcatctgggattttattattattattgctatcatatctttcttcagtgggaggtactgttttctggatcatcatcttacttcatttgtttatttatttagagacggagtctcgctatgtctcttaggctggagtacggtggcatgatctcggctcactacaacctctggcctcctgggttcaagccattcttctgccacagcgtccagagcagctaggactacaggtgtgcgccgccacgcccagctgatttttttttagtagagacggagttttgccatgttggtcaggctggtctcgaactcctgacctcaggtgatccgcctgcctcagcctccacagtgctgagactacaggcatgagccaccatacgtggcctttttttttttttttttttttttggatttttagtagagacggggttttgccatgttggctatgctggtctctgtcctgaccacacgtgatccgcctccctgggcctcccttgtgctaggattacaggtgtgagccacggcgcccggcccatctttcttcctttaaatcgttttcttagtttttattcttaattcttttttttttttttttgagacggagcctcgctctgtctcccaggctggagtgcagtggctcaatcaatctcggctcactgcaagctccgccttcggggttcacgccattctcctgcctcagcctcctaagtagctgggactacaggcgcccgccaccacgcctggctaatttttttgtacttttagtagagacggggtttcaccgtgttagccaggatggtctcgatctcctgaccttctgatccgcctgccttggcctccttattcttaattcttaagaaatgctgtgtgggatgtgagatttccgagtcattgtaggacccaaaatagctccattctacccttatacacgtgaatgatcattagctaggcatggaattcgaggtgttttttttttcttcttctttgagacggagtctagctctgtcacccaggcaggagtgcagtggtgtgatatcggctcactgcagcctccacttcccgggttcaagccgttctcctgcctcagcctcccgagtagctgggactacaggcgcgccaccacgcccggctaatttttgtagttttagtagagacggagtttcaccatgttggccaagctgatcttgaactcctgacctcaggtgatccaccagcccctgcctcccaaagtgctgggattacaggcatgagccaccgcacctggccaggaattccagttttaatattaggttccctcagaactttgaaagaaattgttcttttgtactctctcatctagtagtgttgatgacaagttcggtgttaatgtgatgtatttatttaaccagcagttatatagcatttaccattgttttaagaactttattataacttgtttgatcctcacaaccacatgacttctactgttgtaattatttttattacatacaaataatagaagcacgttatttggagacaaccaatattgttattatgttataataattactatgtttattggccgggtgcggtggctcacgactgtaatcccagcactttgggaggctgaggtgggtggatcacgaggtcaagagatccagaccatcctggctaacatggtgaaaccccatctctactaaaaatacaaaaattagctgcgcatggtggcgcgcctgtagtcccagctacttgggaggctgaggcaggagaatcacttgcacccgggagacagacattgcagtgagccgagatcccgccactgcactccagcctggtgacagagcgagactccatctcagaaaaataatgattattgttatgtttattattatttcagatgagaaaatggaaacacagcagggtcgcgtatcatacccaaggtcactcagctgataaatgtcagagctagtgtggaaaccagaaggacttaatttttatgctcatatgctttcattcttttgtgatcagttttccttcctagattttaaaaagatctttttcttgatagtgtaaactttcattattaggtacccaggtatagatgttattttaaattcagattcattttgatcagtacgtggctcactctttgagtctggagtcttacgttcttcggttttagggaatgctgtttgatgatttcttgacctttttttcttccctttccagactcaggatactggtcctcttagactcatgtatttttatttttattttctctctcattctctggctttccttgaaacctcccccaacctttggtgtttttgcagctttgttgaggtatacttgacatagaataaactgcaggtaattaaagtgtacaattttcttttaacttttttcgagttgaggtcttgctctgtcaccaggctggaatgtagtgtgcaatcatggctcactgcagcctcaaagtcctgggcttaaagtatataatttaatacagtgcatacatctgtgaaaccagcacaaccaagacagtgaacgtgacctctaaaacattccttctgcccttttgtagttcctttctactatccctccctgccacctgtcttttgccaaccactgactggtttgctttctgaccgtatgataagttttcattttctataattttttataaatgagattatatagtatatactcattttttgcctcagttactttcattcagtatacttattttgaaattcttccgttgttgtatgtgtcagtagtttatttcttttttgtttttatttttttttgagatggagtctcgctctgtcgcccaggctggagtgcagtggtgcgatctcggctcactgcaacctccaccttctgggttcaagcaattctcctgcctcagcctcccaagcagctgggattacaggcacatgccaccacacccggctaatttttgtatttttagtagagatggagtttcaccatgttggccaggctggtcttgaactcctgacctcaagtatctgcctgcctcgtcttttaatttttggatagtattctgtgtgtagatacaccacattttatttatttattcagatgattgatgaacattgggattgtttccagtttttggctttctgaaaaagaaacctatgaacatctctgtacaagtcattgtagggacgtatgcttgcatttgtttgggggaaaaacattaggagtgaaatggttggattgtatattaggtgtgtgattacttaaaaagaaaaacctgccagactttttttttcaaactggttgtgccattttacattggcatcagcagcatatcagggttccagttgctcaacttcctcaccaacacttgatatagttagcccttttagttttaggtagtccagtgtactgttaccttattgtggttttaacttgcatttccttcagatgcttatttgctttctgtatatcatcacgggcagggtgaggcatctgttcagatcttttgctcatttttatcttcggttgtcttacttaaatgtagagtttgttacatattctagatagaaatccttagtttgatatatcttttgcaaatattttctcttgatctgtggcttgtctttttacttcttaacagtgtcttgggagcaaacatttaaaaattttaatgaagtctgattaattttttccctttatatttctgctttttgtatttaaggaatcctttgtcaaagccaaggtctcctgtgttttcttagagaagttttatagttttacttcattctgtggtttccattttttggtctagtcatatggtgaattatcggtctttaaatgctaaagccaccttgcattccttggataaacctcacttgatcatgttgtattatttttatatacgttgaattcaagtttgctaaagtttgctaaagttttcttgagaattcttgagaattgtgtctctgttcacaaaagatatttgtagcattcttgtaatgtgtagttgagatgtcagaataatgttgacctcaaattgagttccttcagttttttggaagagtttgtgtagagttagtattgtttcttcctaaaatgtttgatagaatttaccagtgaggccatctggacttggagttttgtgggaaggctttaagctgcaaattaagtttctttagttgatctagaactattgaggttacctatttatttatttatttattttttggatgagcttttttagtttgtatctttcacagattttgcccatttcatctaagtcaagcttgtccaacctgtggcctgcaagctgcatgcaacccaggatgctttgaatgcggcccagcacaaattcgtaaactttcttaaaacatcatgagatttatgcacagaccttttctttttttttcagctcatcagctgtcgttagtattagtggcccaagacaattcttcttccaaagtggcccagggaagccaaaagattggacacccctgatctaagtagttgaattggctgacataaagttgttcatagtattttcttactatccttttttttttgttattaaaatgttttcactcctgtttttacttctcttttgttttcttttttcttcctgttaacttgttattatccttttaatattgttagaatctgtagtgatgttacctctttcattcctgatacttgtaattctactttctttgttttgtcccattatcagtctggctacactgttctcagataactagcttttggtttcattgattttctttattgtttttctgttttctatttctttgattctgctcttatatgtatttgttatgcttactttgggtttaacttgttttttctcttccttgtttattaaggtagaagctgaggtcattgttttgagacatttcttcctctctgatatagatcttgagtgccataaattgccttctagatattgtttaaacagtgtgccacaaatattaacatgttgtattttcattttcatccacttaaaaatatgttctaaaactccctttggcccgctggttatttaagagtgtgacttaattttcacacacatgggagattttccaggtattttttcctgttcgtgatttttaatttaattcccttatcagagatcatatttaatttgaggtctgttgaagtttatcagactggttcagaatatggtctctataaatgttttatgtgtatttgaaaaggatacattttctgctgctgtgaaattttgactataacttttggatttttctgtttctcctttcagttctattggtttttggttgtgtattttgaagctcttttattaggtgcataaatgcttaacattgttctagttttttggtggataatacacttattatgaaatgaccttcattattcttggttaatatttgctcagaaatctattttatttgtcattaatacagccagttattctgactagtgtcagcatggtgtgtttttttctattcttttattttagcctgtttgcatctttatgtttaaagtggacgtttttgtaggtaacataacaattgggtctggcttttttttatttttattttttattttttattttttttgagatggagtcttgctgtgtcgcccaggctggagtgtagtggcgcgatctcggctcactgcaagctccgccacccggtttcatgccattctcctgtctcagccttccgagtagctgggactacaggcgcccgccaccacgcccggcaaatttttttgtttttttttagtagagatggggtttcattcactgtgttagccaggatggtcttgatctcctgacctcgtgatctgcccgcctctgcctcccagagtgctgggattacaggcgtgagccactgcgcctgtccgggtctggcttttttatacagtttgagaatctctgccccctctttttattgggataaaacatacataaaattaccattttgactgttttaaagtgtacaattcaatggaaccaagtatgttcaaattgttgtgcaactgtcaccaatgtctatttccagaacaattttatcatcccaaacagaaacgctacctgttaaacagtaactccttgtccccctccccactttctatctttataaatttgcctattctagttaccttatgtaaatgaaatcataatatttttccttttgtgtctggcttatttctcttaacatagtgttttcaaggtttgtccatgttgttgcatgtctcagaatttcattcctttttaaagctgaatgatactcccattgtatatgggagtatatgtcacactctggacactttggctggttctacctttagtctattatgaataacactgctatgcacattggtgtacaagtatcttttttagtccctgctttcagttcttttgagtatgtacctgtgagtggaatcattggatcatgtaattctgtgtttagcattttgaggaaccaccaaactgtttttctagtctgctttgtaattgggccatttagaacatttatatttaaaatgattattgatggccaggcatgttggctcacgcctgcaatcccagcactttgggaggccaaggaagatggatcatttgaggccaggagttcgagagcagcctggacaacatggtgaaacctcgtctctactaaaaaagtaacaaaaaaaaattagctgggcatagtggtacaacacctataaacccagctactcaggaggctgaggcacaaaatcacttgatcctgggatactgagattgtagtgagctgagattgttccactgcactccagcctgggcgacagagcgagcctctgtctcaaaagacaaaaaaagattattgatatggttagatttaaatctgtcatcttactatttgttttctgtctcatctgttcattgtttcagtttcttaagtcttatgccttcttttaggttgtgtttttttttgtctttttgagaggagtttcactgtgttgcccaggctggagtgcagtggcgcgatctcagctcactgcaagctctgcctcccaggctcacgccattctcctgcctcagcctcccgagtagctgggactacaggcgcctgccaccatgcccagctaagtttttgtatttatttatttttttttagtagagacagggtttcaccgtgttagccaggatggtctctatctcctgacttcctggaattacaggtgtgagccaccgtgcccggccttaggttgtgtttttatgatttcattttattccctttgctcacttattaagaactctttactgattcagtcatcagcttcttcacttcatatactttaactgcttggctcatgcagtcctccatttatcagctttctgaccatcggaaaatgacttaaatgcctaaactctagagagccagagcttcttgttaaaaccaaaccccaagattttttttttttttttttttttttgaagacagagtcttgctctgttgcccaggctggagtgcagtggtgcaatctctgctcactgcaacctctgcctcctgggttcaagccattcttcctcagcctcccaaataactgggacaaccagtgtgcaccatgacgcctggctaatttttgtatttttagtagaggtttcaccacgttggctaagctggtcttgaactcctgacctcaggcgatccgcctgcctcagcctcccaaagtgctgggattagaggcgtgagccaccatgcctgggccctagataaattaaataacacagttcaattgagcaatgaacagtttgccagttgagtggccctcagaaccagaagaggtttggggagctcttgaaaacagaagtgaggtacagaaacagcttaatcttttggcttatttaaacatggccagataagttggcaacctgtgattgactgaagctcgactgctgcgattggcggagactctgctttttgttacagaagtatgctcctaagttaggcttttccttagtggactttatgtaagtaatattgcagttcttcaagtgaagaatcagtaaggagccatcctcaggccaaatttggtgtaagttaacacactacgctacactgtgctgctccctacagtttccccctctggtcatctctgtgcaagggctgaaagcagaaggctgcgtgtcctcatttgttgccagctgggaatgtgtatgttgggtgactcaatttttcgctgctctgtgcatgtccacaaatgactgcgaaagtaccatgattattaattttggggttaaaaataaatttcagtgagtagacatatttgcaaatatgggattcatgaataatgaagattggctatgtatgtatcacagagggtggttgtgtggattagatgtattaataccagttacaatcctgttacagaagcatttgctaaatggcaactatttggaaaatctgatttcagaattttatttggtaaattaatgtttagtagtttatgtgtccaagtaaaggcagagatgtttttgagtctaactcttggtaatactgcgttgtagtgtacagtgtggtcttactgttctcatgtaatgaaatccaggtttcctccactgcctcttttctctcttccatttcattgagtactacttttgtgataggcatcactctgagggaagggagaaaaatcataaggtggacatttatccttgaccctacattctattttctctaatatgattatttctttggagctggttaccacattctttaaacagctttgttgagatatgatttgcatacaataaaattcacccatttaaagtgtacaactcagtgatttttagtattttcacaaatgtgtgcatccatcaccacagtcaattttagaacattttaatcaccttgaaaagaaacttgtaccctttagctgttgtccctctaactgctgtctccttttctcccagccttaagcaaccactaatctactttatgtctatatagatttttcctagtctggactttcacatgagaggaatctatagaatatggtcgtttctggctggctgctttcacttaatattatgttttcaaagttcacccatgttgtagcatgtcgcagtactttattatttgcttatggccaaatactgtgccattgtatggatataccacattttgttcatccatttgtctgttgataaacatttgaacagtttctatgttttggctattatgaataatgctgttttaaacattcatgttatgtttctatgtggatatgttttcgtttttcttgggtgtatacctaggcgtagagttgctggattatatggtttaatcatttgaagaactgccagccactttcccaggttctcgctctgttgcccaggctggagtgcaatggcatgatcatagctcactgcagccttgaactcctgggttcaagcgattctcctgcctcagtctcctgaatagctaggactataggcatgtgccactatgcttggctaactttttttttttttaagagatggggtttctctgtgttgcctactggtcttgaactcctagccccaagtgattgcactattttatattcccaccagtagtgtatgagggttccaatttttccacatttttgctgtgaagcaggtttactgtgtgttgcttaccaacttgtctgagtctgaggagacaaggacatccatgtacaatgttacatgaagagggtttattatttacaaatagacagtaaaggacaacagaagcctaggattcattctgaatgggtcccccatggctcaggaaacatgcccggggcagatagagtcttgactgcaggggccacacttacatggcgggagaggaaccctgaaaggcagcccactctgggttatacacctcagggtttatgtgacacactgagctaatgctttaaaaaatgtcctgcttccaggggtgaaaggaacaaagcccaccttgtcccgggcagttgcgccctcactcaagatgttaaattcctgggagggacaggagcaaggctggacattttcaggcagttcttccctatttcaggatattgcattaccatcacattctacagtcacttttgagaactatgagcaagaaaaggaactgagttagtccaaggccagccaaagaactatgccacacttgccaacacttgttatctgacttggctttagccattctagtgggtgtgtgacgtggtatctcctgtggttttgatttgcattttctgatgactagtcgtgttgagcatcttttcatgtgcttactggccatctgtgtatcttttggagaaatgtctatttaggttctttgtctcctcttcccccttttttttgagacagggtttcactcttgttacccgggctggagggcagtggcacaatctcagctcactgcaacctccatctcccagggtcacgttatcctcccacctcagcctcctgagtagctgggactacaggcaggcaccaccatgcctggctaactttttgtattttgggttgagacagggttttgccatattgcccaggctggtctcgaatcaactcctgagctcagatgatccacctccctcagcctcccaaagtgttgggattacaggcgtgagccatcatacccggcctctttgcccttttaaaattgggttgtcctattgaagtgtaagagttttaaagaatgtattctgaatataagtcccttataagataaatgatttgcaaatattttcccacattctgtggattgtctttccactttcttgatggtgtcctttgaagaataaaagtttaaaattttgtccggttgtggtgactcacgcttgtaatcgcagcactttgggaggctgaggtgggcagatcacttgaggacaggagtttgagaccagcctggccaacatggtgaaaccccgtctctactgaaaatacagaaaattagccgggtgtggtggtgggcgcctgtaatcccagctactcaggaggctggggcaggagaatggcttgaacccaggaggcggaggttgcagtgagccaagattgtgccattgcactccagcctgggcaacaagagcaaaactcagtctcaaaaaacaaacaaacaaaaaagtttaaaattttgatgatgaagtgcagttcatctgcttttttcttttatcgtttgtgcttttgatggcatatctaagaattccattgccaaattcaaggtcacaaatatttacacctgtttttcggaagagttttatagctttagctcttaaatgtaggttcatgatccattttgagttgtttgggttgagttaaggtgtgaagtaatagtccagcttcactttcttgcattggctatctagttgtcctacaccatttgttgaagactgttcttttccccattaaatgatcttgacaccttatcaaaaatcagctaataatagctgtgtgcatttatttctggactcaattccattccattgatctaaatgtttatccttgtcccagtaccgcactgtcttgattactgttgattacagagcacgttgaatttgtcaatcagtttggggagtattgtcatcttaatgttgagtcttgtgttccataaatatgggatgttatttgtttagaactattttgatttctgtcaacagtgttttgtagttttcaaaatataaatttcgtatttctttgttagatttagccctagttttttgatactattgtgagaatgttttaactttatttttggaatactcattgcaagtgtatagaaatgtaattgatttttatatattgattttgtatcctataaccttgctgaagtcatatatcgtaataattttctagtggatcccttaggattttctatatacacaatcatgtcatgtgcaaatatagtttaatttcttttttttctaatatcaataccttttccttttcctgcctaattgccctggctggaacctccagaatagaagtggcaagagcaggcatctttgtcttattcctcattttagagggaaagcatttaggctttgaccaccaagtatgatgttaactgttaggttatttttttgtttgtttgtttttgtttttgcagatgccctttatgttgagaatttcccttctatttctagatgagtatttttttttttaatcatgaaagtgttggatttttcgaacgctttttctatatgaagatgatcgtgtcattttgctttgcaatctgttaatatgatgtgtttaattgattggtttttggatgttcaactaactttgcatttctaggataaatcctacttggtcatggtgtataatattttaatatattgctggcttctgtttgctagtccagtcgtcttgcagtatctgtgagggattggttccaggacctcctgtggatgccgaaatcaacggaggctcaaatctctgatatataatggtgtaatatttgcatataatctatgcacatcttctcgtatattttaaatagtctctgggttacttaaatacctggtacaatgtaaatgctgtgtgaatagttgttatactgtaccatttagggaataatgacaagaaaaggtctgcacatgttgagtaccaacgcaactgtccatttttttcctgaatatttttgatccatgattgatctattccacagatgtagaattgacagatacggagggctgactgtattttgttgaggatttttgcatccatgctcataagagatgctggtctgcagttttttcttttatgtttttgtgtggtcttggtattggtcatattggcccaataaaatgtgttcggaattgttgggaagagttcatgaagaattcgtacaaattcttcttttgaatgtctgatgcaattcagcagtgaagccatttacacttgacttttcttttgggtagtttgcggattactgatttaattgctttaacttgttatgggtttatgcagtttatgtctttcttgaatcatttttggtagtttgtgtctttctagtaatttgtccatttcatctaagttatctaatttgttggtgtatgactattcatggtatttctttataatcctttttgtttttataaggttagcagtaatgtcctgtctctcgtctctgattctagtaacttgagtcttccctcttttttctttcatcagactagctgaaggtttgtcattttttgttgacctttttaaacaactagctttgttggtttcattgatttttctctatttttaaattttcgtttcattaatttctgctctcatcttttattctttctgcttgctttaggtttagtttactctcttttggtatcttaaggtggaaagttaggtaattgatttgagattttttttttaattaactttttcagagccaaatacttctgaagagatatttcttaatctaagcatttgcaactataaatttccatgtgaacactgctttatatgtattccataacattttgtatattgtgtcttcatttgtattgatcccaaagtagtttctggtttcccgtttgatttcttcctagatcccttggttattttggactgtgttgtttaatttccacatatttgtgaatttgccaatttttttttctcttaatggtttctaattttatttcattgtggtcagagtgtatactttgtattatttctatgcttttactttttttgagagcatatttcgtgtacacctgagaatgtatattctgttaagtgtaatgtgctagaaatatctgttaggtctctgttgatagtgttgttcaaattatctgttttcatgttgatcttctgttttgttctattattgaagggggagtattgaagtctccagctatcattgttgaattgccatatgtcttgttttgtgtattttggtgctgttattaggtgcacctgtatttttaattgttatatctttttcttgatggatttactttttatcgttataaaatgaccctctttacctccagtaacatttttttatttgttttagtctgttttatctgatatcagtatagccactccagttttcttgtggttgctgtctgcatgattatcttttctcatccatttacttttactcttttgggtctttgaatctcaagtgtatctcctgtagataacgcagagttagatcatgtttttaaaatccactttgacaagctacctttttgttggattgtttgatccattcacattttaatgtaattattgatagagttacattttactttttgttttttgtatgtctcatgtcatttttctctatttctcctttgtgctttcttttgcaatgagaggatattttctaatatagcattcaaatttttttcttttcttattcagtggccagttactagaaggattctaaattcattagtaattttttccactatatattttttcaaagtcattgttctagagcttaccctatgtatcttgctagaatcaaattcagatttatacttgcttagtttcagtaatacatgctaaaatttattgaactttactgctatatagttcagttcccatcccccctttgtatattattgttatatatattacatatattgacataatccaacaatacatttttttaagagttactttaccgtctgtagccatttccttagcccactgcaactttgtttccatccacccctttttgctattagggcaaatatattacacatatattacattctgccttataagctcaacattatactatgtaatatttatacaattgctttttaattcaattaagagaagaaaggagggaaaatatacttgtgcttattgtttgcatggacttgaattaccatctagagtcacttgctttagtaactttagtaaactttttgtaactttatagcttgaagaacttcgtttagtagtttttgacagtgtggtctgttagcaataattctctcagctttttattgatctgagtctttatgtcaccccagttttgcactatagcttttctggactgagaattcttggttgacagggttcttttgttgttgtttgtttgtttccacttctttactgctttttatgttatcccactacctattggcatcatttatttatttatgtatttatttatttatgtatttatttatttatttattttgagacggagtcttgctgtgtcacccaggctggagtgcagtggcacgatctcggcttactgcaagctccacctcccgggttcacgccattctcctgcctcagcctcctgagtagctggcactacgggcgcctgccaccacatccggctaattttttgtatttttagtagagacagggtttcagcgtgctagccaggatggtctcgatctcctgacatcgtgatcggcctgacttggcctcccaaagtgctgggattacaggcgtgagccaccacgcccggccttatttatttatttttgagatggagtcttgctgtcacccaggttggagtgcagtggcgtgatcttggctcactgtaacctccatctcccgggttcaagcgattctcctgcctcagcctcccgagtagctggggctacaggcatgcaccaccacacctggctaattttttgtatttttagtagagacggggtttcaccatgttggccaggctgatctcgaactcctaaattgtagatctttccaggaattagtttctgacgtcagtgtttggtatttgtgctaacaccaggagggctcctcccagccatcttaatcccgagttttcttctgcaaactagcctgtagtccaggcctgtatcttcattagatctattagtctcctcccagttgctcttcaccatagcttgcactgttttggtttgtttctttgtatttgagacagggtctcactctgttgcccaggctggagtgcagtagtgcgatcttggcccactgcatcctcaacttccggggctcaggtgattctcccacctcagcctcctgagtaagctgggattacaggtatgctatcacacctggctaattttttgtagagatgaggtttcaccatattgcctaggctgatcccaaactcctgggctcaagtgctctgtctcggtgtcccgaattgctctgattatagttatgagccactgtgcctggctgtgtgtgtgtgtgtgtgtgtgtgtgtgtgtgtgtgtgtgtgtgtgtgtagggtctcattttgtcacctaggctatagtgcagtagtggcacaatcagctcactgtagtttccaactcctgggctcatgcagacctctgccttaatctcctaggtagctgggactacaggtacatgccactgtaccttcctgattcttgatggggctccaggactcttatgttccccaggctggccttgaactcctgggtgcaagtgattctcccgcttcagcctcccaaaatgctgattacaggcatgagccactgggcctcattctactttcactgttcttgagaacagcttttttttgtttgttttttaaactttactgtgcacttttgcaaatgaattttgttctaaaatttttacaggttttcttgatttgcttgctgtttgccctcaggatcatttccaaaggctttaaatgtttttgttttaaaagtaatatttaccagtttcactggggagcaggtcgttgaagctcttcatgctgtcatgttagaataaaatcttctgataagactttatttagcaaatgatgatcaatgtcacacaccttgcctattttgtatcctctgtagtacctgatatagaccttggtacacatcactttgaatctagtgaaattacaattaattagtctaacatactggttaaggtaccatctctgagtcatggttttaaatcctagttcctgaatctatagtagtgtgactttggaaaagccacttaacctctctaagcatttgtgttcttaattgtaagtgggatactccagacctcacaaggttgttgtgaggatagaatggaataatccatgagtaaaagcccttgtaacagtgcttatcacgttaagtgctccgtaaatgctagtggtaattattagtcctcattcactaacgtcgtataaaaatgaagatctaacacacgtacaacttgaaaaaatactaatcacccataagtgttaaaattgtcttattataggttgaatttttaagccaaaatactgtaatttcaatttttcattagccctttggccatttctctctaaaatatcacccatggtttgaatttcttttcatagttccaagcttctttaagggaaatctgaaactgagttgtatggtttggcatatgacttccatcagtgggatactcctgttgccctggaacctcagacatgattcatggtttttctaatgttcctgttaaatcctttgtaggtttaaacaaaaacaatgcatctactgagctattggtggtggtttctcctcataaggttgactggaacagtgggttggcatgaaattcattttagggatatacttcaaaacctgtgtaatgtatatttatacaaacattatttgtatatttgtattatctttacttctttaaataccttctttatcttgatttcttggcattttcatgcacaaatataatgatatcccaactgcctatttggaataaatatatcccctgctttatccatgaagtcacgaaggagcaggcttcctactaggcagagctaccttgactgccagccttctggtaggggtgctctctgttccttcctaggcattgttactcagccagggcactgcactgcctttctaacctaagccttcacattctctgggagcttctgtctcaagttgcctggttcacatgggacctgggtgggtgaagggagaggagagggcaggagttgacccatctggctgttgctgtgactggcgctgatgaatcatccagaagctgtcccttgagcctcctctctgggcctagagccctcttgtgttagcccacctttggcagcatatctcttctcacatgttggaggtactgcactccatcttcagttagggctattggttgcccatattttaggtatcactcatcatttctcagccacaaattctggttttccgccgtagttatacagtagatttgtttgtttgtttgtttggtctttcatgtggtcttggggtagaaagggaagactgcagtgtgtgttcagtctgtcatctggggaatccaaaaaataattaaaagtcattacttgaaatacattggttttagggttcagagtggctctccttttagctgccctttgattaaggatctctctttaactgaacaggaaacgtgttggtatagcattggacaaggttcttgaggagtcagttctttgttgagcatcagagtcttctcttgatgaaaggaattctaaagttacataataagtgtgttggacatgtctacagtactcttgaggggaaaatatattcagttttcttactgggaatacctggagctcttttctcaaaattaggacccacctactccgtactttattttttttcctaggtagtagaagtagaaattctcatgtagctccactccatatgaagagctgtgccttttcttgtgctaggcactagggcagggattagcctgctggtgacgtcctgtttttgtgagtcaggttttattggaatacagccatgtccattcatgttgtgttgtttatggttgctttcactcttcaaaggcagatattagttgttgcagctgagatcatatggccagcaggtctgaaatatttactgatttttttcctggagggcacaaagaatgagttttgattttcctgagtgtggtgggccgttggacaggatgaaggtggatgtggactttggggtgtagaggttagatgaagaggcagagagcctcttgccatcatagagtttgttttaattttggggtcatcaaattatctttttctatagactccacccacccccccaagaattgacctgcttttttctttaccacttattccactcactgttcctgatcaagcctttttttcttgattcacagcatgtatgtacagaagattgtctagtagcttcttctctgttctgccttaaatcccttttgttattctttccctccaattctaagtgcaacttgaagcccagttgcattcccgtgattccttctcaaagacagtcaatatcctgaagttggtgtttatcattcctttgcttttcaccatgctttcattgcatatgtattcgtccctgagcaatattgaatgctgttttatttattcataactttctgtaagtggtatactgtatatgttctttttttttttttggcctagtatgtttgtgaccatctagctctagctcttccaatctcacttgcatctcacaagtatatggatgttatatgagcttattcttttcctgatgggcttgtttcctttcctctaagttgatctgtttacttgtttaagagatgagatcttactctgtcgcccaggctggcatacagtggtgtgatcatagctcacggcagccttgaactcctggcctcaagcaatcctctcacctcagcttccgaagtagctgagactacccgcacataccaccatacctgattttaaatttctatttctaacagctttattgagatataatttgtgtatcatgaaattgacctgctgaaagtgtatgattcagtggtttttagtatatttacagagctgtgcaatcatcactattatctgattttagagggtcttcattctcaaaagtaattagcagttgctacccatctccctcccctgtctccaccctcacctgaagcaaccattaatctactttttatatttgcaaacatgtctattttagacttttcatataaatgggattgtatagtacttggtacttcatgactggcttctttcacttaacctaatgtttttgagcttcatccatgatgtagtatgtacatgatgggcttttaaattgcttacagtttttgctgttacaagtgatgctttatatgtgcttgaggaactgttatttttttaagtgacttttattgttaatagtaaaaattagatctcatagtcttaatctcttgctgaggctctggaagagaaaaacaaaggaagtaacatttacaaaaacataattgagtatctctggcagtgagtaagcccttatcttttgaggaactcaatgtagctggggtagattgactaactgtaaaacagtggaagtgctacaagtgaataagcaaaattatgaggaaattcagaaggaacaatttcttgggagatatgtacaaggtgttataaagtgagtgacatttgatttgagtgtagaccctggaaattagtaatttttcaggaagtgggtgttgacaagggaggaagaaggtgttctgaaagaagcatcatgtgacggcattgagagatcaaaaggcattttccaggaacttacaagagagtgagtgggcttcaacaatagtatggcaggataggagactaggaaggctccaggctcattgataaacacctgctgtgagaatcattagaaaaattaggtaagattaaggacgtacacttttatgttttagaaagagaactctgacaatgcagaaagtgagctggagaccagagagtctagaggtggggtagactagatgaaggttgttgtgctcttttaggttagagatggtaacttcttgttgttcatggtggtgggaatgaaaggagatgaagtaggtaagcattttttacgttactttgacaggacttactgatgtgagtggtgagggaaatgaattttaagatgactcccatgatttctcacttgaacaacctgaatgatttgtgaattttctaaacatctacattgtcaaaaataacttgtgttagaagccatccactttctacagataaaatatctgcttcagtttgctttaaggaataaaataacttattataatttaaaggttacttgaagtgttttatttccagttcagaaatgaaacacaagttcatattgagcctaggatctgtcatttttagacttgaacaatcaaactactattaattatcacttcctcatagccaaaagaatgcaatggtgtaaagattccagttgatgccagtaaacctaatccaaatgatgtggagtttgataatctgtatttggatatgaatggaatcatccatccctgtactcatcctgaagacaagtacgtaacccatttttgtcactgatatagcaaatcacagaggaaacattatattatattacattgtttggttgtcattatagaccagcaccaaaaaatgaagatgaaatgatggttgcaatttttgagtacattgacagacttttcagtattgtaagaccaagaagacttctctacatggcaatagatggagtggtaagtgctaaaataattagaagcctccattttgtttttttttgctgtgttaccagtgtctagaatgaaagtcagctaaataatgaaaaatgttgacagtgatgaacttgagaaagaaagcctcatccttcagtcattcattcagatgtttttttgtgtgtgtgttttgtgcttattttgtgctcagtactgtgaaatactggggatgttggcgactgcccttgcttttgaacttttggcttactgtcaaagggaaggaggcatagataaatgggtgagcttaattatttataggcattataagcactagataatacatgcagggtgttgagggaagaggaagtcagtgctactaaggaagttaggatatagagaagaggtgacttttgttccatttctttaacaatgaagaataattgggagattggtgggtggtggtgggagatggatgggacagggtttggggagggaggaccttccagatttctcaaatgtggcaggtaaacacactttccgtgcctttgaccacactgacatgttttggcaactacaggtggtttgaattgagaagggaagtatagcaaaagcttgagaaagccttaccgtctggagtttggactgtatcctataggcaatgagtagtcatgaaaatgatttgagaggagtaagttactgacctatgataataataccaagtagctccttttataaatgaccagcaaactctattaggggggtaaggtaagatataactctaaatttatttagctatctgcaagtagattcttttaattttagtgcatcctagcggctaatgggatgattttggaaattcagagaactttgaatccaagaagattaacttttctgtgagattcgtcttactcagtgaaaaaccttagctacctgataacttgctaagttgcagttagaatggagtaaagagtaaaaagaaaaggaatatgtcttgtttagagcacatttcagtttatattcagctaattttttttgaagaaatctttagctttactccagtgtgttctttctgctacatcaagtataaaatatgtacacatttatatgcatgtgtgtgtacatgtttatacacacatttttttgtttatatataaatgtagatacagaactttgtacttgagagggcttcattagatggtctcattctacagaaaagggaattgtttaaagagaatattaaataacttacatttagatgtaaacaggatatttcacagtttcttcccaccccaaaactcagttcagtaacttcgaaaatcttacaatctagttcactttatttgggcttttccactgaaattgcatttggttagagtgatttaaaagtacttctggttaaggcattatttctttctaactgctatgccttattgaaaagacagaaaaattataaaccttattgtgggaaatagaagtgcaccgagattcttcacataaagaaatagttttctgttgcttttatgagacattgtggatcccatttggacaccattcttccttttaggtgtggacatagagaatgtcttcctgatcttagttcagtagtaactgctcatcagatgttggctgggtcttttgagtaaagtgagctttctttcttgggtgccctgaatcaagcaccctaaccgaggggaactggtgttagactgggagggcttgaagtataagtgctagggcttcataggatgtttgtccatttgacgtggcactcattcacctgattgagctcagcttttgggttctcggtccaaatttaagttctcagcatctggtatctgtcatgaaaggattattagacacattacttacctttcttccattttagtgtactgcttttataagaacaactgattcaaaataaggtacagatttatttgtgaatattttgatgagtgttatggaatatgaaatacattttcaggcaccacgtgctaaaatgaaccagcagcgttcaaggaggttcagggcatcaaaagaaggaatggaagcagcagtcgagaagcagcgagtcagggaagaaatattggcaaaaggtaaagaatatgcatcttgaagttggattttttcataagatgtatgcagaatgagggggtggtggcaactttttcttacaaagaggcaagcttttaatttaataaggatcccagaatatccagtgttcactgttgaggaaaagtagttcatgaaatctaccaataggcttaataggcttgtttattttcaaactctccagtaagagggagccttgggaatagggaattctggtggagattgcagattgtcaactcctctcagggccagtgcagctctttaacaaacttttatgtctctgtagaatagaaatatagtaagtattttttactacttttctctgtggcggctgtcagaaagctatagtgctgtaaacattttcctcaaatcagctttggtttgcttgctttttgaaactcagaggtctatctgaggaagccggaggtgattcgatccacatttacaggctgttgccaagtcatttgcatactttcaatataggttgatggagcaggcacagtacttatggttccttcaagtttggaggggttagggtgggatgtcttcatttttgcagttccccaaagccttaaaattcctggtggctacatgggtaggaactgactaagcctcagagaaaaggaagatcagggagtgttgatgccagttgggactggttctctcctaccacacctgtgtgtgaggtagggtatggttgtagcaggtttgtttggtgttctgctacttaagggggtataatagaccagaaaagccacagtgtcttggctccggataattgcactctgcagttgaaaaaggatgccatagtatagccagctcaggcctgcaattacaataaattttatattacttgaattttgctggaagtgtacaagtatatagttcctttagctgcaacttgtaattaagactctaaaacctgtttgtatttataacaatgtttctgattttaagaatgtcttttttttgaagatgtgatgaaatatacttgtttcttgagaagcagctaatagtgatagagaggaaaaaataggatttttatattcctctacctgataattgtatttcttatcctgtaaagctgtgatgaactcggcattttaaatttcatttttcttaggcacctttattttaggaactgttatcaaaaaatatggcctctaactggtgtgtgtgtgtgtgtgtgtgtgtgtgtgtgtgtgtgtgtgtattctcttacagagtgaagaacttcataatttttatgtaacaatataatatcttttgtgtaccatatattgttttacagtcttattaaaacataatttaaaaggctgagcacgatggctcacccctgtaatcccagcattttgggaggccgaggacggcagatgactggaggtcaggagttcaagaccagcctggccaacacaatgaaactgcgtctctactaaaaatacaaaaattagccaggcgtggtggcaggcgcctgtaatcccagcttctcaggaggctgagacaggagaatcgcttgaaccccggaaggcggaggttgcagtgagccgagattgcaccactgcactccagcctgggtgacagaatgagactctgtctcaaataataataataataataatttaaatttgagagatggaatcttattttcttcccagtgagggaacatttttcctcggatgacgagacttcactttcttttgtagtggaactttttgtttttgttgttctggcttaatgttgagtaatttatctcactttttatggggagaacaaaacgttgcctcttttctctaggtggctttcttcctccagaagaaataaaagaaagatttgacagcaactgtattacaccagtaagtagtctcatactttgctagctattgctaactcttaaatgataggttaatttatttctttctatcattttagggaactgaattcatggacaatcttgctaaatgccttcgctattacatagctgatcgtttaaataatgaccctgggtggaaaaatttgacagtaagtttcacattttgatacttcagaaagattagggtgatcattcgaggctgtactttgatatgactgacattatttatccttctgccctgccccataaaatgctagttgactgttggaagaaagaaaagcttccagggtttttggagatggggtatccttgcatggttaggttttagatagctgaattttctcttaaagccaattttgtcctcttaccatcactatgaagctataaaatgggattcataatttaaaaaatatatataggaaagtaatttttaaatggaaatttccattattacatatcaatatacagcaaaattagtaagttgtggggctgtcttaaatggctgtgttcccaaatatttaaataatatgtaaatgaacttgtttgtaattttaggttcataagctggcttccctattaatgagaaatggtaaattatattttatagatatgtgttattgattattcttggggcatatatggttcagcactatatccttgcatagtagtgaaaataggagcttgtgaatgatcagtttttctgatggctaggtctgacccagacatttcattcctttccattacatgtagtaagtcaatcaatgaagtggttttggtgtctctcacacacacacaccccttctttattcagaaaattttcagtgaagtagttttggtgtttttcacacacacacacacacacacacacacacacacacacacccttattcagaaaattttcccgtaacacttatctcagtttttcttgagacatataattcttttgatttttgtgcctatagaaaattggggataatctgaaagtgttaacaatttttttataggttattttatctgatgctagtgctcctggtgaaggagaacataaaatcatggattacattagaaggcaaagaggtaaagcttacttaccaatatttgattatatgttctatttttaaaaagccattgcatagaaaatacttggtatgaagtgatattcttgtggtatataatatattaatataaatacatgtttctctcttgtttagcccagcctaaccatgacccaaatactcatcattgtttatgtggagcagatggtaagtttcttctttgggatttgcttcttttggattaaaccatagcaagttgatgggttggtgtgcagtaatggattattcatggttacctggaagttccaaaatgccttggttattttatgttcgacagggaactagtattgagttgctgtttaatctgtggtcaatgatctttaatttcttttcttctttcttacatttttcaaccttttaactccccatacctttaaaatggagaatttcccaagtgtttaatccttagtggcagtctatgttgtaggtccacgtatctagaggacttcctgttaactgggaaatgccaggaagtgtcaagctttggggctttgctgctcatttgggtgctcatttgggcttttctttgtgttggcatctcatagtagtttatggtaagacttctctcagaatactcactgttcgatgtttttctcattgttgattgatagctgatctcattatgcttggccttgccacacatgaaccgaactttaccattattagagaagaattcaaaccaaacaagcccaaaccatgtggtctttgtaatcagtttggacatgaggtcaaagattgtgaaggtttgccaagagaaaagaagggaaaggtaagaactttgagatggtagttgcctcattaaaaaaaaaaatctattgtggtaaaatgtatatgacataaaatatcatttcaaccattttaaagtatacaattaaatagcattaaatatttgagttaccttgtttttaaaatggatgaagagaagattgtggttgattagttctttatgtgcttgttctgttaccgttacccttcacagagatgtatcttttttcttttttttttcttttgagacagtctcgacagagacgaatcttttaaagtactttaaaataaacctgcattcaaaaacatgcacacactcatcctttctacttagcactttttctgatattgcctatatctacacgaggcttagttcccatagataataatgcccatagcttgtaatttgtttgtggaagttatttgtttgaaatactcttcttaaaaggaactacaacttcttaagacttttaagttactcccactttttatgtattttaggttcacttggttatgtccagtcccctttaaaggggcttctgtttcaataatatggtgcctcttgagtcatatgctttttgaggggggaaaaagaatatggtgcctctttcaaagacatcgttaagtgaaaaaagagataaatatagtgtattatttcagatatgtaatacaataaagacagtatacatgtatctatgcacatctgttcacaaggaaggggtaatcattggttgggtataggtcatcagttggcaaacttcaatcctccaggtttggcctgtgagctatgttttttacatttttaaagtgttgttaaaaacaaaataaaacatgaaagactattaaacagagatcatatatgtcccccagtagccaaaataatttactgtctggccctttgcagaaaatgtttgctgacccctgatctagacgtggttgattttatgggtaatttttattttaaaatgcattggtgagcttttaaaaattaaatacttgtgatattaaaatggattgtgcgttagaaaaagccttaaaatttgcttggttggaaaaaattactggacgtagagtagacttgtttcatcttcattcctgttcttgcagcatgatgaacttgccgatagtcttccttgtgcagaaggagagtttatcttccttcggcttaatgttcttcgtgaggtatgtagcaataatcattgaaatcagcactctaaagcagggtgcctttgatagctgtaatggcagcattcctttttggttgtagtatttggaaagagaactcacaatggccagcctaccattcacatttgatgttgagaggagcattgatgactgggttttcatgtgcttctttgtgggaaatgacttcctccctcatttgccatcgttagagattaggtatgtgcatttgtgtagcttttcaaacgactgttttaggcttcttgactttactgtgcctactggtcctaatgcataatgtttgtctcttgctgacagggaaaatgcaattgaccgtttggttaacatatacaaaaatgtggtacacaaaactggggtaagttcattcttgaatgatttcaaaacagaagtatttgcttttataagaagatcattttacatatattttatcacttacagggttaccttacagaaagtggttatgtcaatctgcaaagagtacagatgatcatgttagcagttggtgaagttgaggatagcatttttaaaaagagaaaggatgatgaggtaaagtgtttctattgcagtagctaaaattgctcctgtctctaataggctatgatgatcctgtgattacttttaatctctttgagtgtgtttttatatcattatggtgtgtcaacactaatgtaatcatgagtggtcagtgctttgattattttataaaggttgtgctgcttgctctgtggaactatgtattgtaccctgtttgagttgcattgtaatgttttttctgtcttcataatctgaatataaatccaaacacatttctaatcaataggatttgaaatgcgggtaccaaggctggaagtctattgggattgaactagtggctgtcatgttttgaaggcaggaagacaggttaagaagaattgacaatgtagggagtgtgggttggattatatcagccagggcagagggttgggagaatgtaggatctgtggagagctgaatctcttaaaaaattgaaacacaagaaggaaataaaatagcaaagcatttgaaaattgattgcatattatggatgagcgcttacatgaaaagtccaggttctggcttgggcagttaggaatttgctggtgccatttactaagatagcaagcactaggggtggaatgggttggggtggggacaaagtaaaaactgagtttcattttggagatgtttaatgtgagggggctgtaggacacctgagaggagaaaagtccattaagcagttgaatgtgtataaagctcagggcagaagtcttttgaagagatttgagaaccattaactaatggaagatacttgaaactatgagtgtactatgagtgtgaccctgggagcttgtgtggagtaaaagtacctttaatagaagcctagggaaccacggacatttaaagagaaagaggagccagttatagagaggtagaaggaaattcctgaagagatgggaagccatgctcaaggggtcacagtgagatggacaggcacttcgtccgtggacagggtttgggatccactggtgagctgataggagtggaggagcagcagcctggaggcagagtgattggagggtgattgcagggtgtagcaagggaggccagcagtgggcaaaataagcaggtaatagcttcttagaaacagcaaggaaatcctttcagaaactgattttataaaagtcatgtggctattttaagcagataacaacatatattactgctacattgcttcatgatctcccagcacattaaaatgtgtcattgaatcttattttctgttttcatcaactttgtatactgtagctagtgatctcttatttttaaaactttgggtgtcattttatgtaacatagtgggttgactgtaagcattctttccaaaagccttcagtacttggtaatgtttttatgtgatgtcaagagttttttgcatatagaattcaaattacagaactagctttgtctggaagatcagatgtcaattggaacatttttaactactttttcaacaattatggtggcatcccttgatctgctgctacatactttgtaccacttggtttaaaaaccttgagttacagtagcttctactgtctctttagccgactctgcaccttgagttggcattagaggaggaagtatgggatttggtagacaccatagtgttacagatttaattaatacgatttttcagctgacctggcaggagagggcattttaaagctttggatctttgttggtgttcctgaagtcatgccatgtccttcagcatgattggacaccaggggaaaccctcaaaaacgcaataggaaagtttccagatatatgtatttttctgggaagtatgtccctggcatttgacagatttccaaaggagttcatagcacaaaaaagggagagatccataaggtccacccaggtggtcttctgtttgtgcgtgactaccacccttagagataggcatttaacagaccagcagaacaaatgatagaaaaggaatacattaatatttgttattggctaagcgtggtggctcatgcctttaatcccagcactttgggaggctaaggtgggcagatcacctgaggttaggagcttgagaccagcctggccaacttggtgaaaccccatctctactaaaaatacaaaaatttaagctgggcgtggtggtgggcgcctataatcccagccgcttgggaggctgaggcaggagaattgcttgaacccaagaggtggaggctgcagtgagctgggatcatgctactgcactccagccagggcgacagagcaagtctcttgtctccaaagaaaaaaaaattgttattgaagttgagcatttaggcaagaaatgtgttgctttttattgtatgagctttcatgtttaccttttaacttgggaatgttgttcatttattaagcaaatatttaagtatttaccatgtgccagacagtgttctgagtgctagtgatacagcaaaaaacaaaaaaggagacagaaatccctgccctcatggagtttacattctcttgggagagctggaagataaacacagtaactaagtaaacctcattaagtgttagagaataagtgccacaaagaaaactaaagcaggtgaggaggcatctgggaagggagaggttgggcattacagttctagaaaaggtgacgagagatggcctcactgacagctgaccttgattaaagttgtaaaggatgtgagggagcacactgcagatgttttcaggaagcacattacagacagagggaatcaccagtgccaaggccctggggcaggaacatactcaggatgttcacagaacacaaaggagccagtgtggaaggagcagaggaggcaaaggaagagcagtaggagatgaactcagaaagaagacggagggcccagtctggtaggacccaacaggtcatcataggactgttaactttcattgtgcatcagtgtaaggttttgagtagaaaagtgacaagatttgacacatactgtaaaaggatcactctagctgccatgttggaagtactgtgtggagggaaaggtcaaagcagtgagccccaggccagtgaggagccttttttacagtaatccaagggagcctggatggtagcagtggagatcatcagaggcagttggattctgaacatgttttgaaggtagaaccagtgggattggcaaatggattaaacatagagtgtaagagaaggaaaggtgacacaagactgaaagatgttttgagcaaccctcatggaaagactgggaggtgcaaaggtgggttggggattctatttcagacatgtgaagtttgagatagccaaatggagatgctaagtatggagaggctctggttggggagtcatcagcatgtagatggtgttcaaagccatgagaccaggtgatgactcccatgggaggagagaagtggagagatccaagtactgggcccaggggagcaccaacattaactcatttctgcccagtgttccattattggaacgataagcttgtgggagttatttatatcctactgctaaaggtcatcaccaaggtttgatttttcacacaaaaaacttgcaacctccagcataaatgggttaagaggctggggagttgaggaacaaagacacatagcaagagggaaggagatcaggtgagtgtagcctcctggaagccaagtgaagactgatccaaggaggaaagaatcctggtcagataaggactgaaatctgactaatggatttcatagtctgcaggtcattggtgacctacacaagagacgtttcattgaagatgggacagaagcttgattaaataaatcagtggtttctacatcagaggaggttttagggtagttgatcacctgggctccactttagagcaggagacttatgtatccggcattcagctttttgcctggcagaaagcaccaatttccaatttccttaaggccttatattgcagttggtaggactgactttggaagtgtacctactaggatgaccatcagtataggatccactggcccctgttttaggctacaacagtagctatggccaccctagctgtcatttcagttccttgatactcagggaaacttgggcatggttatgggaggcctgcgaatggcccagagttagtagggaacaagatgaacacaaaattctgtctagttgaaaccatggctacaatttggaaatgagtagggggaaagaatcaacgtgggctggaccctctcctgtgaattaaattggcccagagtagtaagccgtgcatacacctcaatttccttcctttttttccatcggattgatatttttggaatctggccagggtgagggataatgtttgcgtagagtcccacttctctcttttctccattgtgccatgcatgctatagaataagagccctttttagataacagagtctaattaaattgtcttgctgatttttttaaaaatggataccttagttattaactaccttcaactaaaccttaagaattgttgagttgtttattttattttattttattttttaacttacttgtatcttctccatattgacagcctgtttgctccaggataaaaccaagggtctttgtaatggctttgcattttcctaaaatgattcaaaagctttctgaacagaattaccaagatcaattgaattgtatctaaattcagtcttccattgttaagttctgataagcagcattttgaacatatagtcttattgcctggtttaatcatgtacctagatttctggggtcgtcctttaaaacttaagttgtctcccaaatcattcctggtaatgcttaactctgacatttttgtgtaattatttgacagaatatgtggattttatacttttaggacagttttagaagacgacagaaagaaaaaagaaagagaatgaaggtgagttttaattaatttcatgagattggcaatagcgtaattttacaatttatgaggaagatgttcattacagtagctttattccttgtccagtaggacttagtcagggacgtaagtgtccacccagttacctttttacctgtagaaagaacactggtgtcgatttaaagaaggtcctctaggctctgatgtctgaagggatacacttgggaggtgagaggtgggtggcagttagctatttgaatggtttacagcaatcaagtattgttttttaagtaaaaatggtcaatattttgtatccccttgaaagttactgtactcttatttctacctctttgtcagattaatctttctagaacacaacactctaaacttgtttctctgctctaaaagcaccactgactccttaatcccctcagaatccaattctgtcttagtttggtgttcagagcacactgtcatccagttgaattccagccgtccagcacatcccctgttgtcttctaaatacgccatatccctgctgattaagagtgttgccttcatttgtaacctctgaatggatttttgactttgcagctcactgacatcataccttttctacaaggcctcccttcttggttatgctcatagtacaggttgagcaatcctttcttttaactctggtgcttcctatgtctgatacatgttttcttacttaattgcataatgctttatagtcatttaacttctttagttcttgttttcttatcttccctactagattttcaagcttgtggagtttagggactgccttttactacgttttgttagaattaagcaatttcaggaaacaagaagggagaaaagtagagttatttattgttgcagtgggttcaaaatcatttagattgggaggggcatatttggtttctacttatatattattatttttgtcagtatcttagtcagccaagactatcacctatgttagctataatcatatctaattaattggaaataaagagttaaattctagcaaggcaaagggtaaataaaagttgtatttccacaaaaattagccgggtgtggtgacgtgtgcctgtaatcccagctactcgggaggctgaggtgagaggatcgcttgaattcaggaagcagaggttgcagtgagtggagattgcaccactgcaccctagcctgcacaacagagtgagactctgtctcaaaaataaataaataaatttaaaaagttgtatttcctaagtataactcaaactcaactttttttaaacctaaattattttgtttttattagcctgaaattgtgtctcgaatgttttctgtaattataaaaagcagtgggttagcataatgagacttgaaagattttctctatgtttcagtataatgtattatatgtactttaggactgagttattaagtattataggctattgtttagaaggtataagttaccatcaaatcaaagtgtagacaaccttgtaatattaacgaagatcatttggttttttagtgagttttgtaaagtgcttacagtttggactttattccattgcccttctttcctttctgtcatctaactgtgttgtgatttaattttaatttctacattcattccatttatgttagagagatcaaccagctttcactcctagtggaatattaactcctcatgccttgggttcaagaaattcaccaggttctcaagtagccagtaatccgagacaagcagcctatgaaatgaggatgcagaataactctgtaagtggcttacttttatgtgacatttaagagtggtgaatatcacatacctcttgcaggggtggtgtgtgtgtgaaatttatcacagcctggagttttgttttatagtttttcttaattgctttgccttgagaaatgtttagttctgttaagtccatctttatcaatatgaaaatatccaaatgatgtgaaagaagagcacgtaggattgttgatacatgcgaatataaagagctgattccagtttgggtgacagcgtgagaccctgtctcaaaaataagctaagtggctgcagtgtttttgtaatgcagatgaaccacacactgcttctcccttctccaaagaatagggtggtgaatggttctagaagcttgtcaagggacatccatatgtctcaaagctgaggcaagaggaggaggatgggttttattcccttatttcccctttccttcagtgggcagttgtgagcattttgcaaaatagtattccttaggtgtaaactctggctctccaattcagcatggaatagatctaaataaatatcttaaggtagcacttactggttactccctgtttgtgaactcagcaactgcatgcatttatttgccttgtggtattcttccatatttgaacttggtaatccaaactccagaagcaaatcaacctatcctgcaaggctgtactttgtccaccaccttcctattgtagtggaaatagaccatgagctctcagaatacccagtgggacagcaacagggctgagggaacagaccctgatctaacagtagaggaaggaacatacacttttgctatgatatatccaaggaaattgaataagcttggatatttaatttctgttattctgttagttatcctattgatgctcatatggaacagaaatagctgatgcccatcattcaagattttagtgactaccatccccgcagagcagaactgagagtgactggtggtgttatatgccctgttgatggtagagtacttttttttttaaatcttgggaggcaggcaggtttaaactttgccagctgtggttgcttcaggaagcattccagtattatcttcaggcccggtagtattaggccacaggaccagactgtagatcgataacatctgccataggagtagtaatggggagactggtgatgaggttgcttctttgattctgtcttaattaacttcccttgccacaattatttctatatagaggaggtatggaattcgaatctttgcagagtgggattttcacctagaatgttctaaatttaaggaaattttgaagtcaaattaccagtttatttaaagggagccattaaagttacagatttctcgtgttttatttttctgagctgttgggttgtagtctctaatacttatctactgatgattaacattcttagtgttttattaaatagcttccatttccttatatttgtggttttatatttagcgttcttcagtgtggtttcattatatctaatttgatgaaaaaaacagcttaagaagaaatttgaatttaatatgaatctggtatgttcacaagggaatatttttgttggtagagacagcagcggagatttagcattaaatggtgaacagcatttttttctagaaagtatattattatttgttttctaaagatagagtttatatcttgttagtaattaattttgttaaagtttgctttttacacaacttctctgtagacagttaatgggaatgtcactctcataatttaatacaaatggattagtgtagggttgaaaaaacaatagtgattacttactgaatggttaactaccatgtaccatgtaggcagcatgccagtaatctttcacatgtattgatgcatttaatccttgcaataacttgtaaggaaacagaacgttatcatccccattttaagatgaggctcacagaggttaagtaataaattgttcaaggccacacagccagtaaaggttgaatttggtatttcagactcagatctgtatgactaaaatacaacaatacctgcctcgttttccaagtacaacagtgccttcctgtatttatttttattgggtttttttttgacaatattgtctgtaccttttcattaataacattgacattatgtttttaaaagagatgtgctctaagttctatgtgaaatatgatttcgtattattttaacttttcttgacctgtggtatgaactgtgtttatgctgtggatactctaattattatatcattcaaatggccttctgtgctctcagtttaaaaaaaattcagtttacttgaaatagctaatatactgtgagtaacagaagaaaaacttgactgtggaaatgtttctgccccttatgtttttggtgatgtggtcctttagcttgagtaactaaagttgcagaacattttcttttaatttttaaatattaaaatatgttagggttatattaaaatatgttaattaaaattaacgtattatgttaattgagttaggtacaaagggaagataatactgaatttaaagtgacagctaagtctttgaaataccaataaaatctgcatttttctaagatgactaatagatttttatttgttgattgatttttaaaactgaacatataaagtaatttaagttatctaacacagtcttattaaacttgcttttcagagtggttgtactaggttgaagacttaaccatttagctgcattctcaccagcattgactattttatatattattacatctatattattatatattatatgctatatatgtaatgcattttatatatcacataattttttcccctcatagctttgccatttggtaggtggcaaatgattgtgaattcctaacaggaattgttacaactgattgtcacaaatgattgtgaaccaccaaaggaaaataaaattcaagtactataatttttaaaaatctataaaattaaaactttttttttcttcagaaacttttttttttgccctaataatgttaattgtttttagtttaagcatagaaagtttgggtattacattacttcttttgaggggaagtgaaatggagcaagatcagtctctgtaccttctaaatatgtttaccatctctatgtagtagctttaaaaatgttactgtgaaacatggtaagtagtggtggttggatgtaccttcttatgtaaaatgaataatgaaatccttcttctgtaatgtcatcattgtctgcagagtccttcgatatctcctaatacgagtttcacatctgatggctccccgtctccattaggaggaattaagcgaaaagcagaagacagtgacagtgaacctgagccagaggataatgtcaggtgaagccattttttggtagcactttgttagcaaattgctgaaatagatgcagtctaattaatgctatttagcttagagcagcagtgccttcagatgcttgcctgtgatctttttatccatcagtaattaatgtggagggttagaatagtcagtaaattccagtgagatgtgtaagctgtagctgttaaacctaagtgtctagattagtatgcgtgcaggctttcgtcctccaatccacttttccctctgagaccaggcacaagatcggctagatatcatatctaggtgtttagctctgactatgtgatctgaatgttgctgtttggagactgattaaattttcaagctgcttaacctagaaagttcagttatacttagacacttaatatagtttgccttaatcttctctattgaaagagttcttcctcaaaatgaaatatgcagaaatcattctgttaagagatcaatatgtatgttttttaaaaaccacagacttgcatatgcgcaattatatttcatgacagaggagtttccctttaactgtatacttcaaatttaaaataggaagctgattctttaattcatcctgaagtttgagatcattatataataagattaacaacctctcatgtaattaaatccagatttgaaccgtgggctccaagtgcaaaaggccaacaatctcaataattgtagctcattaagaatttaggaaaacgatctatttcaaaggtaaacaagacagtagtcacctacagctcatgcttcttttacaggacatggaaagtgtgtgatttgtgtttatgattagaaactttgcaagggtcacgtgtggttctgcacatttttctaacattctttgatttcagatccatgtctacttgtgattgaacatttactctgtatatctttagtttctatcctctactttctgtactttgggttttcctcttacagcatgtctttggttttgtttactatgtagccatcatgatcaatactagtttaataggtaacttgatttgtttagtattttattgtttaatcctagaggaaattgtttaatcctagaggaaatcattgtttaatcctagaggaaatgcctctaccaagaaatgcttggggcttttagcattttttcattaaccttttctgtaaaatagtgataatccaccttatgaatgggggatatttctaattgttattctgtgactcctttgtgttgtgggaggggcagattaaaattgatatggtatattctgaaacatgactgcaattaatatgtgaaatctggcacatggaaaagaggcctaaatggagaatcatcttgatgttcttgatctgttctgatgtttgtaaagtgttatttggcttctttatgttccttaaatgttaaatcttagagaataagaaatggattcttaaaaaaaataatacattggatgaaaatgtggttggtcacattgtattttcagtgatgaatgataatttagtggattcattgacctgcttctagattttaccataacatacatatgtttgtgtgtgtgtatgtatacatagatatatagagatatagaatgtgtatgtctctctatatatatctctatctcctttccttaagccatcaacaactcttagctgaaagagggataaggcccaagcaaggatagagagagtaggtatacacataatttctgcctaatgtctagattattcttttataaactatttttttacatttaaaaaagttacctgtgtgcgtcttaagtaatttagttgactttctttgtatggtttaaatatattttaacaaactaaggaacttgaactatttaaaatatcttcaatatttgaatcttaaaatgtagctttagaattgtacaaagaaacatataaagtagtattaaaatttgagcaaatgtgttctgtatctttttcaataacatttttgaaaatgtggttttataatggtcttaccagaatcagtgattggggtgtgtttaactgtctttaagttgataataaatcctatgaaattagactttttagaaatagttaaatgaatctgtgttagcatgactgtttaactctttcacatttcccctgggtattaaatataaattgatttggggtataaattagtagacagcctgttactgaaggtgtgttaattcagcataaatgagctgtgcctggttttaggttatgggaagctggctggaagcagcggtactacaagaacaaatttgatgtggatgcagctgatgagaaattccgtcggaaagttgtgcagtcgtacgttgaaggactttgctgggttcttagatattattaccaggtacaaaaagaatattttcctctgaatttgtagttaatcatttaagaaaaatagtaatttctttttttttgtttgttttttgtttttgagacggagtcttgccctgtcacctgggcgggagggcaatggcgtgatctcaactcactgcgacctctgcctcccaggttcaagcgattctcctgcctcagcctcctgagtagctaggattacagagcgcaccaccacacccggctaatttttgtatttttagtagagacggggtttcaccatgttggtcaggctggtctcaaactcctgacctcgtgatccgcctgcctcagcctcctaaagtagtgggattacaggcatgaaccactgcgtccagcccagtaatttctgtaataatagtattattgagctggatcttgaaaacaaacccaggctcattttttaaagctccctattcagaagtccgtatttgtaaatatttgtttctgaagacgtggaagtttcttagatattaatatagaaacaaagctaatttttgttaaaagtattttcaggatcaagtaatgtggttgactgcactttgtctttaagatgacgaaaggttagtgctttttaaattggagtttaaaaataactgagtaatgaattgacagtcactgaatgactgaacagaggacaaaccctggaaaatacaaataagaattctaaaggaatttgaatgctacgcttttcataatatagtgatgatacatgaagcacattctaattggaataacctgtatcctaccttttgataattgagatgtcagattggtgagagattaggtagacatattgaggactgtaacactgatagttaatatctggtttcgtgcttagagagcaaaccaagttaaatttggtgtgacctgggaatagatgaagtttgttgacaagtagaaagtaacacagtgcactgagtattgaccgttaagtactctgtttgcgttttactcctactgtcaagatttcaactcactagacactgtcttaacacatcttagatatctctttcctatgagtataacttgcttttgttttctttttgctgtgtttactcacatgtttttatagtcaaaagaaacttgtcaggtgaaaatataatggtgaattttaaaatgaaactcatggctgttttactttcaactgctgttccaataatgtctctaaccaccttacatgctcagtaaatgtctgctgtgactgcttttggttttacttgatgatgacagctctagagatggaaagaaatgtcaccaaatgtattttaaggataaaaatcttaccaaattgtgtttgtgaatatgaagtttggcagtaactactgatttttcaaagatgctttgtagcatttttaaagtcaaagagccattgatatgaattagaaacttcaaacttaaggaatttttaggagtcatggaaaagatcagtatttggaatatatgccagaagtcatgtgttttataagtagaatattataggttaacagtctaatttttgttttttttaattgtgttcatcattaacataggtttttgattttgttgttacttttttaatgattctagggctgtgcttcctggaagtggtattatccatttcattatgcaccatttgcttcagactttgaaggcattgcagacatgccatctgattttgagaagggtacgaaaccggtaagcttaattacttaaagtcataaagtttatagaattctggattagataataatcttgggtctttaatgttttttcttttttcagtttaaaccactagaacaacttatgggggtatttccagctgcaagtggtaattttctacctccatcatggcggaagctcatgagtgatcctgtgagtctcagtattttgagtgtgtgggtgacaggatttttgtcacattttattcatatcagttacaattgcttttgcagctgatagttaaaacagtgaagtacagaaacagtatgttttttactccaaacacacatatatttcctgctttctttggccctgcacagtaaatcagtttgttttggggagaaatttttttgtttagtttttgatttttttgtttgtttgtttgtaagacggagtcttgcactgttgcccaggctggattgcagtggcaccatcggctcactacaagctctgcctcccgggttcacgccattctcctgcctcagcctcctgagtagctgggactataggtgctcgccaccacgcccagctaattttttgtatttttagtagagatggggtttcaccttgttagccaggatggtcttgatctcgtgacctcgtgatctgcccacctcggcctcccaaagtgctgggattacaggcgtgagccaccgtgcctggccggggaaaaatttttgttctctggctacctgtaagtctttaattttatttgttccagccatatttggtagccaccagagatgaggaaactgccttacccaaaatcacctgtgaacttgttttgtatgctagctagaaagagtgagacccagccgggaagtaggaaatgttagagtacgtaaaccctttactttctgcctgtctgaagcccatagttgtcaattctaaaattcttctacagtaatgctttttcatcttttaaaataacattgttcattttgttttactatacttgggattaatgacctaatgtctcttaacattttttaaaaggaatgcactttattttctcatcagaccttataacttgaatgaaagtcatatcaaattctttataacagagatgtgtgacttctgttttgattctttacttttctccctaatataggattctagtataattgacttctatcctgaagattttgctattgatttgaatgggaagaaatatgcatggcaaggtaaaatttagacgttcttttctggtaaaactgtgaacaaacataatttttgaaatgaaataattctgtaaaagataaatattttagcctgggcaacatggtgaaatctcatttctacaaaaaatacaaaaattagcctggcgtggtggcttgcacctgtagtcccatctacttaggaggctgaggtgggaggattgcttgagtctgggaggtcttggttacagggagccacgattgcaccactgcattccagcctggaagacagagtgaggccctgtctcataaataaataaatgaataaataaatattttaaaaggtaaatattttgagaattatatgtgaaatgttgatatttctccatccaacctgggattagcaatgattaatagtaaatttaattataacattcttagaagcagtaaattgggttgaaataggttgataattacatcttttgtttcctttgtgattaattaatggggcttgttacattcagtcagtagctcattaacaccttttgaggttgctgagaaatacagaaacacagtagtatccatgtggagatttatgtatactccatggaaacttttgaaaaatatgctagaaacttttatgtagtttaaatacttgatgttgatcattacttttcctactagtttttcattccattaacagattttgtaggaatggctatataaaatttgtactaactttaaggtgtgtttaccactcaaccaatatgtaatgatgattgaatgtaaaatacaataaagaaatatcttggccgggcgcagtggctcgcgcctgtaatcccagcaatttgggaggccaaggcgggcggatcacgaggtcaggagatcgagaccatcctggctaacacagtgaaacaccgtctctactagaaatacaaaaaattagcctggtgtggtggcgggcgcctgtagtcccagctactcgggaggcagaggcaggagaatggcgtgaacccgggaggcagagcttgcagtgagtcgagatagcaccactgcactccagcctgggcgacagagcaagactccgtctcaaaaaaaaaaaaaaaaaaaaaaaaaaaagaaatatctcttacacagtaaaccagctgttgtttcacactaaagtcatcctgcagcaaattatttaaccttttcttccaccatacattttcctagggtaataaacacatttggtaaaatcatattttcattttttacttattgttctctgtggttggaatggccaataaaatgacttacggagaatcttgagacaaagggggaataaataatacaatttacaaattgaaaaatcaggaggctttggagttgacttgatttatttagtagcagaaatatcatatcgcttcagtggaatgatcatggaagtgcacccattggggttatataagggttgtgtgcttcatgatcatgtattattacatgttaaatggattggagattcgggtttttcaaggtgctttgtggaggatgtcttgattaaagcagagagagaagatgcatgggacagtgagggatgtaaaaatactaagtaaattaagaagcaaatatatttttgtgtttgttaaataagtaaattattaaatcgttgtctgggtttattaagtagataattaaatatataaacatgcaggtgacttgtcaactctgtcattgtggtatacattatttctttcactgacaggatattttcaatataacttaactctaggggaaaagtgagataatgtacaagagttcagatttcttcacatcctctccaacatttgttattttgtttttattagtaataaccatgctaatgggtatgaatggtatttcattgtggtggcgatttgcattttcctaatgattagtgatactgaacatcgtttcatgtcctttttggccatttctaaatctttggagaaatgtctgttcaaatcctttgctcaattttgaattgggttgattttgttgttgcattatagaagttttttatatattctagacattaatcttttattggatatatgatttgcatgtattttctcttattctgtggattatcttttcaccctgtgatgatgtcctttgatgcacacaagtttttaattttgatgaaatcaagtttatcttttttgttgtttcctgtgcttttggtgtcatatccaagaaatctttaccaaatccgacatcatgaatcttttttcctatgtctgcttctaaaagttacacagttttagttcttacatttaaatctgatccattttgaattaatttttgtatatggtgtaaagtaatggtccaacttcattcttttgcatgtgcatatcaaattttcccggcaccacttgttgaaaagaccattcttccccccattgaataagttggcactctttgttgaaaatattctgggctgtctattctagtccattgagctatgtgtttttccttatgccaatgctatactgttgtaattactgtcgctttgtagtgagttttgaagtcagaaattgtgtcttccaactttattcatattcaaggtccgttgagatttcacatgaattttaggatgggtttaaattttgacctcaaatatttttgtattttatacaatgttttatataaatatttttacttagcttagtagcgagaacacacttttcttgaggtaaaatttagtactgttgggaaatacagtttcttcctcatacatgtttttaaaacttacttagtgaaagtaatgataatacttagttaagctcttacctgggttgagcacatcttaatagaagataaactatatctggatacgtcaacatttttaaatgtgtgcttatcaacattatatgtaatttttttttttttaaagacagagtctcactctgttgcccaggctggagtgcagtgacgcgatctcggctcactgtaacctccgtctcacaggtccaagcaatttctcctgcctcagtctcctgagtagctgggattaccgccgtgtgccaccacacctgcctaatttttttgtattttttgtagaggtgggatttcaccatgttggccaggctggtctcgaactcctgacctcaggtgatccgcccacctcagcctcccaaagtgctgggattataggcgtgagccaccgcacccggcccaacacacgtaatttaaaagcagtatcgttttggtcaatttgcttagtactatatagatatatagcatagtagttttgatgctgtatattttatatatgaatagagaatttaagtaattccatcaagtcacacagtggcagagttaagacctgaactcagaaagtctgatactagagctcacatttgaagtgactgtgtaatacctaagttattaccagtacttgggctccctctgggtattgaaagaattcagtgagataatgcatgtaacataagaagtgttcagaaaacagtagctgctattctcatgtttactatcagctcactgtagctctgtcatatctggatgtaaggcattcctttctatgctggccagtaggggtaatttattgcttagtgattttcttgctgttgagtagcacttcacattgttaactgattggatttagcttctggaattgatattgtagaaaagtcttattttatatatgtataatatttaatatataatatttaatatttaatatataatataatatatgtttatatatattttatatatatataaatataaataaatgtagtgggtaggatatatatatatatatatatatatatatatatatatatatatctcttaaatgtagtgggtagaaaacaagctagatgatgctgtagtttccccttgatatagttctcttaagtgtatgactaaataatgttttagcaatttcctgggtttttttcatgtgtttatcagtaattgaaatagcctgactcacatgttaggtattaagagccttgaaatcactcttttaggccattcaaaattcatactagaacttagtttctttttaacttaaaaagaaaaaaaaaagatcaggtgcagtggctcatgcttgtaatctcaggactttgggaggccaagttggaaggattgcttgaaacaaggaatttgagaccagcctgcgtaacacaaggagacctcatctctacaaaaaattttaaaaattagctgggtgtggtggtggcatgtgcctgtagtcccagctactcaggaggctgaagtgggaggattgcttgagcctgcaagtttgaggctgcagtgagcaatgatcgtgccactgcactccagcttgggtgacagagtgagaccctatcttaaaaaaaaaaaaaaaacaactgttactaggtagtgaaattgaacatgattcctaaccttggaataattaattaagctaaataagacttggaaaccttttcatttctcataattttaaagggaataatcacaaataacagtggttttgagtagcagtagtttcagaattatttaacactatttagcatttgtctttgctgtgtattgtaaaatttttgtttagccaaaatactacttatactgtgtagagcagaaaatatatacgcttcaataactttgtatatttttcttatagcattgtattagtgatgtgcttctttgaaaattatgcttttgggtccaaataagtgcccttaatttcagcatactccagaggatcattttaagtctcaaatgaatagcctctgttctgtcccctgccccctaagttatttaagcaagtctttaaaatttttttgtatataaattaattagtaggctttaaaatgtaaaaagaatactatggaattttagagcaggaggagatctatgcattttggttgaacagaattgagtattttagttgaaatgctctcattttacaaaagatgaaaccaagtactagaaagaagaaaggacacactcaagccctagggagagtaactggcttgcttgggggcatcttagtaactaaagtgagaatatattactggtatccaggtagccatttgttcatttatttaaaatttttatcaccatggagttaagattcagaaaacatgattttccatataagccattttaagaatggaaaatacgtagaattttttcttctgcaactacaggggaaatattagcatctgagttttggcttaatgagacaataagagttcagttccaaaatgtttttgtatcagcaaggaaactctactagaaacgttcatttcgagcaatgataagttggaatttgggtgatcctggtagcaggggtggttcatttgcacttgttttttcaggtgttgctctcttgccattcgtggatgagcgaaggctacgagctgccctagaagaggtatacccagacctcactccagaagagagtaagaattatacttcttagttaacattgatctgtgtaatatacactttatatttctgtataaaattagaccttccttctcctgtttgtcagatttcccataaaggggatataaatcattgattttattttcttattacagacgttgactttgcttcttaattcattatctgtaagttgagtagtagttaaataaaatgttttaacttacaagtatttcttaaattttttaaaaagcaatacttcaacaatatcctttgacattttgattcttatatgacatgcacacacgaaagtatcttttgcctgttgggaagatattattcattttctccatctaccttcttccctactcctcctttctccccagtaataactactttgtttaaaaggttagggtgaaacaaaagcatatgctcttagagtgctaacttgaaatatgacataaaaggaggcaatttgtaatcaatactgacagtaaaaagtattcatattcggaaattgcaaagctgggctctattgaaaaatttaataccattataataagcctctagaaacaatttctgtatcaaaaagattgtcttttagaacaatcttttcatcaaatgacactgtatatgtttccttagggaatgattatgtatttcttatactaagaaaatgagtttattataaaaagaaaatattgccctttatcttgcagtatattcatacgtatttcagtgggttttttttcctgataactattgatctttttgaaacttttttgttaaaatatttttttccccatagaggcacatcacgcatttagatctatcactataattaaaaaattttttttaaattgatatgtaatagttacacatgtattttgggtccatgtgatattttgatacctatatacaatatgtgatcaaaatagggtaattgggatatccatcacctcacatttatcttttctttgtgttgggaacattacagtttctttcttctattttgaaatatgtaataaattactaacttctccacagtactatcaaatactagaacttactcttgtctaacctatcactttaaaattatttttcataaattttataattaagttcttaacacttagatgctttcccttgttttatgctcataaaaattggtcttgcaggtacaatttttttatgtgtaggtcttattcttttctttctccctagccagaagaaacagccttggaggtgatgtcttatttgtggggaaacatcacccactccatgacttcattttagagctgtaccagacaggttccacagaggtatgttacgcaatttggttaattagaaatgcactttttaaaattttggtaaaatatgcataacataaaatttaccattataaccatttttaagtggttattctgtggcattaagtatatttccagtgttgtataaccattagcactttttcagaactttttcatcttcccaaatagaatttctgtaccttttaaataatgttaaataatgtatcagaatttcatacctttttatggctgaataatactctatgtgtacttttttatccacttatctattggtaaatatttgggtttgtttctgccttttggctcttatgaatgatgctgctatgaacactcaagaatctgcttgagtcccagttttccattctttgcatatgagatcaggaatgcatttttccacagccagtggaggtaccccctgaactatgtcatgggattcaaggaaagttttctttggatgaagaagccattcttccagatcagtaagtttcattttgtatataattgaggtgactggaaggaagtttagttaggatttttttccttgttgtctaaatgtttattttctaataatagtgagaaaattgtatttaaaataagacaaaaccttgctgactgaaaaatgcttgggttcaaagcctagctcttcaaagtagctgtgtcaccttgtgcagggagctctgggagtccctttcaggatattctgaaggttaaaactcttttcataatgatactaagatgttacggtgttacttgcttttcttacactttctctcttgagtgcacagtggagttttccagaggcctctcaagagatagaagcagaggagagtagctattaaatagatactaaccagatattaatgagatttttgaaagtatacaacaatgacatcgttttgctttgtaaaaaaatagctttttataagaatgttatttatgttaacatgtagggtatcttttagtattttaaaaatttcttagtcataatttttaatgggtaaatgttcataaatataaccactataaacaaaagccctttgagatttaagaatgtaaaagggttctgagaccagagtttgtgaaccacatgtcaagggtacatttccaggaatggaactgctggccatagagtatgtgtatcttcattttttttctaggtaatatttctaggaggtttgtcaaggtggttacactgtgttgtaatcccagtggcagtttgtgagagatcttgttgctctacgttttggcaaacccttgtcacagctttaatttctgtcagtctggtggatgctcattgacatcttgtggtttatagttgcagttctttgagtactaatgagattgaatgccttatggttaatagttaaccatttcatgtatgtggtacttactctttttttttaagatataaatggtttttattgtttttgttagtgcattctaatgatttatcttttctaaagactaacaaacatagcaacatcttatttccacttacctaaaaggttacagtttacagagagatgtttcttctcttgtttccttctagaatagtatgttctcctgttcctatgttaagggatctgacacagaacactgtagtcaggtaagttttccaaaattcatggcattcacccagaacacagctctgaacttgcaaatccattttaaaagacctttgattcacaaggaaatggcagctgttaatccaccaatgcttcgagattggagagtccctgtgttgcagaccttacagcagagcctcttaactctaaattatgtatattgttaaggttactgatttaacatgcttgcttatctgttttctggtttcccatgacaacctgtaattcttcctggattaggcaagtgggaggtaaagagtaggagtatctagcagtttgttatataggaacaaacagaactctacaccccagaggttcacacagcttccctgtattacaacagactattttacttatgtttataatcatggccctgcagagtttgaacacaaaaatattctgtagtatgttttagttaagatgacatagaacagaatatatttgtgaaaatttttattagcaattataaacttaaagggctaatttcttctctctggaaaactaatttatatctcagttctttggtgctgacagcattttctattgagtaaaaataatataaaatgtaatatgaccatttggactaaaatccaacaaattgactactcatttgtattttataatgacaaatcttgatgacagaatttagttgtcattttctccaatctttaggtaagactaaagcaaacacatctcaggtattcaagaatttgataaaagcctgctaatcctgaatcctccttttccatccatttttgtttctctccccctcaggaaatattttagatttttttttagatttccctttgtgaaatataaacatgtttatttcctatcttaaatggattcaggtagtaaatgattgccattctagaaaggcttttatttaaagaaaactactgtgaattcgaaaaatctttctggatgagttgcttacgtttatctttacgtataattttttgtttatctttacacctaatttgtcctggttctttgtctttgtgctcttttgttaagggtggagtacagaattgaaagccacgctcctaaacccatcacaaacaatctggctctgacagattcagtgtgaacactgtgtattaacccttggagtctctggctttcattaaagcattggcgcttcaggccaattaattccacggttctctctttggattgtcacatgtttgcttgtgcttctcaatttttctgcatatattcaagggccttcctgcctaaccctctagaaatagttaattctacttaactttctaattaggatagagaggcttgcccagaggagagttacagagttaatggaaacattttggattttttgtttggatgatgatgatgttggttggttgtttctgagcctaaaggggcctttggtatttagtacatactatgttcacaagattattaaatttataaaacaggccgggcgcggtggctcacacctgtaatcccagcactttgggaggccagggtggtgggtggatcatctgagatcaggagttcaagactagcctggccaacatggtgaaaccctatctctactaaaactgcaaaaaattagctgggcatggtggtgcatgcctatagtcccagctactcaggaggctgaggtgagagaaccgcttgaacccaggaggccgaggcctcagtgagccaagatcacaccacttgggcaacagagcaagactccatctcaaaaaaaaaaaaaatgtataaaacaaatcccagatctaaatgcatattcaggtgtatattgaaaataactttataataaaatcaactaaattaggttaatttgctgaagatttgtgggagaccaaagttaacttttcccttaggtaaaagtaattttcagtgttttctctgaagggcggcaacattgaggcagagatccagtttttacagcaggtttttgcatgtttgttttagggcttgttgtacattccagtgttaaatttgctttataactttaacttacaattttcagatttaaaaaatctcagaatatactcaccagtcatttgccagttatttctcttttgactcctggcatttttttcctcttccttatttaaatacatctagtatcccatttgatatttgagaaatcgtttcctcaagttgagtttaggtaagttcttcccattgtattcattcttatctgtagtgctcagaaagtatgttatacaagctgttgaagtcccttaaattcgtagacagacccttagagaatatagtcaactctaacctaggagatcatatttttttcccatttctaattccacaaattattcaacatattagcttctgcatgtgagttttcctcccagtctgtcatctggagggtaagtgcatatgtgtgcttttactttttcaaggcctgatgcaccttggcagggccctggccctgtgcttgaacccccaggtcctcaggatgcttccttcctgcccaggctgatcccttcaataccctttgacctccgcctcttcctcctgttgtttggagtgctcttcctttcttttctccacctgccccatagcctgccgtttattgctttgcttttcttctaaagcataatttatacagtttttatatatgttgtttccagcagtagtgttgttaggttgttttttttttttttctcatagcacctagcagagttctaaacccatatttaaaaagctcagttgttcatagtgttgcaaccagtgtttgccaaagtctttgaagagcgtaaacttttttcttcagaggagtgtttcttagactttttgtattcacttttggatgaatcagacaagatatagaatgttttattccttcaaggagattttttgttttaatgtgaatgtgtatggagatggattttttaagtaactatttctgcagcatttgcaaggcttatgcttggcaagcagataactcaagatccaaagcctgaaggaagtggaatacatgcagtcagcagtggatttgatggtggaaaacagttgggagggtttcactttcgatgcttaattggttaacctcttctgatagaatgtcacaatcctataaactctttaagtgttttaaaatgtcaagtatatgaatcatgagattttcctgcaagaacagtttgcctttgtatgccaatttagcattaattatggaatgtatcagggaaaggttgtgtaaaaatgaaacttgatatttggagttttctgctttctttctgaattatgttaacactctctaacagtaatacttaaaatagcatttctaaggataattcttaaagcgaatcagaaaaaggtgttctatattccattccttttctattgagactttgctacagtattttcttcttaccagcagtgctgaaagtgctacttgtggtataaataaaagcactgttcagtttccttattttcaaccatgcttaggttttaaatttttatttactttgcccttgatgtgtttatgaagacaatcaagcatttaaaatagtgaggttacctattaaggaaaggatctgttatgctacttgggggaaagctggtctggtacataaaagcttgatgagtcaacagtgtttcacctgcatttggaaaaagtggatgaaaatactgttgtttaaaaatacttcagtttacagaattagatgaagcaatacgaatctaaacacaagtctcttacctcagctggtcagactgttgagtccgtaggctgtattaactcatttccttcctctgcttctcagagcttgcttgagggtgcttctctctttacctcagtgttacttactacttccctagataagccttccacaagtaacccttttgcttctgatgatggaatttaaatgacatagacatgaaaaaaataaaagaccttcaaatgtttggatccatataaaaagttacctttttgagtctttgcctaatgggttcctgcttagtctgtgtgtttgacttttaggaagtttgtttgaatctgagttatggctgttatcacattggaaaaatacatttctaaaaacatagtagatcttagtatacatttttgggaacaaattaagatactaagaatctttcaacccttggaagcttaatccattttaggagagagtgtgtcttcaaattgttctcaaagatccaaggaaaaatgatattaatactttggtatcataaatagtgtcctcatctttgaatggaaacttccaaacttatttttagatactccttttctatctcctaatggtttgtattgtattaagtgtgtagatccttttgttgaatgtggttctgaggggaagtagggatgatcttggagactgtcctattgacttggaaagtttttccctttcagagcatgagcatgaataatggaattttaaaaacaattttattaaggaataattggaaaacaaatggatttgttttctcaaactttagtttcagctgtcttattaaatctcttgttataaccattctcctgcagaagtggttatctctgtgacgctgggattttctcttctccctgggagcttattaccttggctatttccttcattttcttagtttcaggtctttctgtgcatgacttggagatcttcatctgagctcgatctccattctagttccagccttaccatttcatttactttcccaacgttcccatccaagatgtgtgtcgaagactgttgcttaggctctgttggtgacctctttatgggtgtccctctgctctctcgcacactgctgctgggttgttctttctgaaattatctttgatcactttcacgtcctcattgactacttgcaaaggcatcacattatactcacacaaaccctccatgaccataacccacttctgttacctttcttcctgccccacttctgctcaaatgcgtttttactctaatttagcccttctcaactggagttccatgggagaattctgccttgagatcttaaagcatctgttgtatgtatcagattgtaggtagcagtttgtgtcctgtatctctagaatgatactagctatgttttttccttgggagaattgagaatgtactcactcatcattttttgtagggcttaattccctcccacatccccattgagaagggctgctccagtaaaactgtactgttccttggtcctgggaccctttccatatctttgttccatttgtttcctctgccaccctgtgaccaatcctgtctcatcttaaaccgcagcctcttggatgatgttttccttggtcctcaggtgaaataattccctccccgcagtacacacatagctttagcccacactgacaaagatgtttatatggaaggtgtatacacacacatgctttgactcagcatcttttctgtgcctgttgttgcattttccactttcttccttatttcccttattagaaggggaggcaggcttgatgcctggcggtgtgcataacctccctcccaccgtgaaccgtgcatgcgataggtattctaatagtttggcaaagtgctaaaaacgccctgctgaaacacagatacctgcttcaaaacactttatttgcaagtcttgctttgttacttgactttttatctgcaaagccctaatgagcacaaatacttaactaccattttctctgtcatcctcttaaacctttatcactgcctgtcctaccttgccctgccccatgccatcttgccagtacagaaaatctgagctaaagacagttgtcagtgaagagtgagttgtaagaagaactagttgagtaataagtattgttcagctgttgagcttatggtatatttattgtaagtgaatccatttttgtgtacttaaaatgaaaatttctgtaaagcagatagactctagttaaagtggcagtattcagaaagaaaactgctgtctaaaaatgtcaaccaggtcaataaaactttttttaaaaacctttttaactgactgtaagtgtaatcattggaggaattttgaaaaatatgttaaaggaaacaagttactaacttatagagaaaaatcactgataatcgattgatgaatatgtctagtctgttgtatatatgtttcccatgtcattaaggtcattaagtattctgttactaaatttttttttttgagacggagtctcactctgtcgcccaggctggagtgcagtggtgtggtcttggctcactgcgacctctgcctctcaggttcacaccattctcctgcctcagcctcccgagtagctgggactacaggcgcccgccaccacgcccagctaattttttgtatttttagtagagatggggtttcactgtgttagccaggatggtctcgatctcctgaccttgtgagccactgcacccaaccttctattactaaatttttaaaaatattatctgagttcttcctttttaggaaggactagtttttttaaccagtccactgttattcatacacttgggttttacagtctttgaaacattatgaataatagtgttataagtatccttaagtataaatctggtgtataaccagagtcctggaagaagcattgctatgtcagaagacagacttaggtacttaccaacctttgggataggtaaacacacatacataccactaccacggctatcactaccagaaaagaagttcgacccagcttatactcaaagcctgagtgtatagcttttaaaaatagttatactgtccaggcgcggtggctcatgtctgtaatcccatcactttgggaagctgaggtgggtgggtcttatgagtccaggagttcaaggccatcctgggccatgtggggaaaccccatctctacaaaaaatacaaaaattagccgggcatggtgttgtgtacctgtagtctcagctatgagagaggctgaggtgagaggatctctgagcctgggaggttgagactgcaatgagctgtgagtgtgccactgcactccagcctgggcaacagggcgagacctgtctcaaaaaaaaaaaaaaaagcatatttgtgtagttttcaaatggtgaaaattattttattacttaaaaataacacattaggagagaagggtacaagggtccaactgtgaagtttaattttttttgttaagtccatcccccccgcaccatagatttcttagctatttgtgtgcattttttgattttgcaaatatttctattggtatatccatcttttctttattaaaataagagctaatctgcctcaagatgctttggggtttttgcagtggactgaacaaaattaaaggttattttatttttattttttgttgttgtaaacctcttcgacctgtctacaatatcattttgaaatttgagttggggcaatgtctgttacttctctgtcatcaccaatagtcagctagaacataacttttccctcagagaaagttacatgaaggttatatgtaccaggaattagagacagtttggtgaggaagacatttagccatttgtcaaacccatttattaactaaaataatttttggagaggacttaaacatgaaaaatacctcagtctacatgataagacaggctgatataatcagatcattgaattgtttcttgttcttttccagtattaattttaaagacccacagtttgctgaagattacatttttaaagctgtaatgcttccaggagcaaggtaacaacagtaaattacctagatttattttgtacaaatggttttcatccctattactaagtgttgtctttttaaatggtcagaaagccagcagcagtactgaaacctagtgactgggaaaaatccagcaatggacggcagtggaagcctcagcttggctttaaccgtgaccggaggcctgtgcacctggatcaggcagccttcaggactttggggtgagttgtcagtttttagcccttgtatattttgctttttctgaatcatcccataaaacaagtcagtatttatgccatatatataaatttatgccatatatataatatatgattatatattatatatattatatataatatataattacatatataatatataattatatataatattatataatatataattatatatataatatatataatataatatatatataaaattataaatttatatatatataattacaggagtgagccaccgtgcccggccgaaacccagtattttcataaagtttatatatataatatatataaatatatattatatttatagtttatataatatatataaatatatattatatttatagtttatatatataacatatataaatatatattatatttatagtttatatatataacatatataaatatatatttatagtttatataatatatataaatatatattatatttatagtttatatatataatatagtttatatatatatattatatatataaactttatgaaaatactgggtttgggccgggcacggtggctcgctcctgtaatcccagcactttgggaggctgaggcaggcagatcatgagatcaggagatcaagaccatcctggctaacacagtgaaaccccgtctctactaaacaaaatacaaaaagttatctgggcatggtggcaggcgcctggcgcctgtagacccagctagttggcaggctgaggcaggggaatggcatgaacctgggaggcggagcttgcagtgagctgagattgcgtcactgcactccagcctgggcgacagagggagacttccgtctcaaccaaaaaaaaaaaaagggaaaaaaagaaaatactgagtttgtttcacacatatatttttgtctcaccaccatggcagaccaccactactactatgtcctctcataacattgcttacatacttaaaaccaagcaaagagtggagctccatctttaaaacctaaacaggcattttggacaacacattattgtacaccacaaatatctaacagaccataaaatacaactgttttgtaagtattttaataactttgatactgctctgcttttcttcatttttaaaaattcacttctccatttatgtattgctatatgtgttgcatgagaattctattactttctctaagacgttttactgtttttctgactcttacttcaagggaataaaacctcctctttacccgcaagaaagttttagctgaattaattaatgtatgatggagactctttttcaagtgttaaccaatatattggtgtagaagcctccagtctcttaaatttttgtttgcccagtgcttgaacagtggtatctcgtagttgcttgaattggcatttccctgcctactgaaattatcttttaatatgtttattagtaatttgtatttcctctcctatgaatttccagtttttatcctttgccctttttagttaactgaattgtctttttcctagctgtagaagatactatagagagaggggacttgtaaacaataacaggtaaagctggtatagaaagagcaacaggcttgccataatgttaatgagttaggattcatgcattaataatgataacttataaatagatgtttccagttagtggggaaaccttaagattcaaaaaattatttaggcagaaggtcaccatcaacatgtaatttatacagcaaatattaagagggatagtgtggcagagtgattaagagcatgggctttagatcttaaatgtctggattcagatacctttttttttttttaaccacttaatatacttgtgaactttaccgaaccactctgtgcctccatttccttatgtctgaggtggagacagtaattatacctacatattcttaaaattatgaagttatgagaattaagtgagcctaatgtctgtcaagcgcttagggtagttcctaaacactatgtaaacattagttgttattgtcattgttttggaaaaatcttcattcttagtagcagtaaaagaaatgcagatttaaaatagtcttaactttttccattatttcaactgttttggaaagcaacatagtatttcctctgaatagagcagtgagttcagaagatactcttaacctttggtccaaattcctacctcttggatttgtgaggaggaaataattttagatgagcataattatatgcccaaatatttatattgtattgtaatctatactactagtacgaaatgagagaaatggtttagtaaagtataagacatcaacatagtaaagtattctataggtttatgtgttggaattacaaagatgaagaaaagatacaggcaagtatttgatatagtaaattaaaaatagcaagatgtagagtagtcatgtatacagtgatagcaagaacatggatccttaaggacaaaactgaaacataatgcaaaaaaagaaaaatatgcaaattatttttcgtatgatgtaagttgtaaatatttaaatggttatcaattaagagtcttggtgtggcagatgaacatttgctatcactattaccattatgtagttttgagctttaattataaaccacctttttgtttgtattatcttaatcagatctgttagtgaagacgtggctatgagcatttgttttatttgtgtcagctgtgttatgatgggtatatcactatacaatttttttttcttgtgttgggtccttttatagccatgtgatgccaagaggctcaggaactggcatttacagcaatgctgcaccaccacctgtgacttaccagggaaacttatacaggccgcttttgagaggacaagcccagattccaaaacttatgtcaagtaagcttttacaaatcggttattttacattataaattaaatatcacagcaaatgttggtttctaatcttctttgctgaaaaagatttgttgtatcagtgcagacagtgaactttaaaaacatgtaagttagaagagttgtgagagaataccttatgcaaaatctttcatacattttttatctttatttttgtgggtacattgtagctgtatatatttatggggaacatgagatattttgacacaggcatacaatgagtaataatcacatcagggtagatggggtatccatcacctctagcatttatcttttgtgttagaaataatccaattatattcttaattattttgaaatgtacaattaaattattgactatggtcatcctgctgtgctatcaaatactagatcttattcattgtttctaactattttttcatagccattaaccatcctcccctccccaacccttcccctactacccttcccagcctctggtaaccgtccttctactctctgtctccacgagttcagttgttttaatttgtagctcccacaaatagtgagaacatgcaaagtttgtctttttgtgcctgacttgtttcatgtaacataacgacctccgtttccatccacattgttacaggtgacaagatctcattcttttttgtggctgaacagtactccattgtgtatatgtaccacattttatttatccattcatctgttgatgcacacttaggttgcttccaaatcttggctactgtgaatagtgctgcagtaaatgtgggagtgcagatgtctccttgacgtactgatttccctgttttggggtatatacctagcattagggattgctggatcatatggtagctctatactaatttacattcccaccagtggtccatgagagttcccttttctccatatcctcactggcatttgttattgcctgtcttttggataaaagccattttaactggggcaagatgatacctcattgtagttctgattttcatttctctgatcatcagtgatgttgagcaactttttatatacctgtttgccatttgtgtgtcttttgagaaatgtctattcagatattttgcccactttaaaatcagattattaggtttttttcctatagagttgtttgagctccttacatattctggttattaaactcttgtcaaatggatagtttgcagatattttctctcattccatgggttgtctcttcactttgctgattgtttcctttgctgtgcagaagctttttaacttgatgtgattacatttgttcatttttgctttggttgcctgtgcttgtggggtattgctcaagaaatgtttgcccaaaccaatatcctaaagattttccccaaagttttgttgtagcagtttcatagatttaagtctttaaactatttttatttgattttttatatgatgagagataaatttatggttttattcttctgcatatggatatccagttttcccagcaccatttattgaagagactgtcctttcctcagtgtatgttcttggttcctttgtcgaaaatgagttcactgtagatgtatggatttatttctgggttctctgttgtattccattggtctgttatctgttttgatgccggtaccatactgttgtggttactattgctctgtagtataatttgaagtcaggtaatgtgattattccagctttgttctttttgctcaggataactttgattattctgggtctgtttttcatcttgactatatatagttaaatgaataaggtaatttggatttcttccttaatcttcacttaaaatctgtttctcagttaacacaggcaaaaaaaagtatgaggaaatgattgcaatttatttaattaatacaagtataattaaatcagatatggtagatatggatcgtcatcacttagttgcctgaaagacaaaggtgtccctttcttgattcaaattgtatctcaatgctacctacaatatagccagggactgctttaggtagactatacctttaaccctatatttctggaagacattagtctttccttaacccctcataatctgttttgtggacaggtcagaaatgttgaccacaaaaataattaacatggcatttggattgcagtgggaaagggaaaagatagttgaatgttagacttcatagattttacattgattttaaattgtgtccccatttaatgttatttttgagctccattgttatgcccatttatcaaagaattgtaagtcatgtgccagtgtttgtttctcaaaatgaatgtcttcatgaaggctttgtttctccattcctggttgtctggttgccacaagggcagcatgggggagaagaaacagtgtggcaagatgctcacgtttgttaaatctgagtgtcatatcattaaaacatttttttctaaatgtttgaaatatttcataaaaatttgatttccaaaaaacagagtgatactttgttatagatacccctcagagctgtttttaaaccgaagctgtacttatgaaagaacgtgccaggttaaaatggataattgatgggaaatatttgtactatgcacctagcactgttgtaatgctagttaagttacacaccagaagtccagattttctggatgtagtacccaagaagaaattggttctataggtcttactctttcagggccctctgtttttagtgtattcactctctgtctctgttcctctctctggcagtgtagctttgctgtatagcttaatgacattgagtggagctttgtgaggctctatcatgcaaactatggacttgtgttcagtgaagcacagaaggggcacagaggtacagagtcagtggtcctgtgggaatctgcttggtgcagtggctaacagctgcttcccgtaagatttagcaaataacatttctaggtatttccatgtattcagtatcaagtcataccatgtacaacaggagagtctaatcattttgaaggagctatctttgccctaagattttactaataaatggtgaaagcatatccaacatatttttaaagccagctgttactgacacattccttatcagtttcttttttcttgtgactttttaccatttacatggataccatggccttttgcttctagcagaaggatcatgttccaataataagggaaagaagccagaaggttcttttatttattagctttacaccaaaggagagaatttcatgcccttaggggcctacagttctatagttcttcgtctgccttctttggaaatagacaactcttgtttgcatctgtgtattttatttcaaataatggagtcccctctctacttttattaatattactttggttaaataactccttatttgccattgttgtggctgttattagatttaatgtgtacttacaaagtacaaaatacttacagactttaattagaatgtattccagttagaatatctttatttcagttacgtcatgaaaaaattgggagatatgttttgtaaagtagggattgatttagagcaagaaacaagtaccctctgcctcgtgacttgtaaacattgactcaactgaggattagtgctgggactctaatgacatttaacatcttttcaaagggcacaggaatgggaggagtgaaaaagtttatggacaaaaaattggcaatcatgtgatatttaaattgagccaacaagtggggaatttgggctcctctaggctgagagaaaattatgagctttgaagtacatggcaagtagttgggtggtgttaagcatagcataactggtacaaaattagactgggagcatacttggaacagattatgaggggaggagagctaatttttaaaatatttttagtgatttttaaatatatttttaaaatgcatttttaactacagtacatgttaattgaataaaatgtggcatgtagcaataaaacataaaaaacacccataattccacagtcccgaaataagcagtgtttctttttattatttcatgtgtgcaagttttgaaaattagattattgtacgtgtatttttacatatagttttttattgaaatgtaacatatgtaaagtgctaaatcgaaccgtacagtgtagtttttatgaaatagatatattcatgtattcaccattcagattcagtagaaaagtgtcagtcctcagaagccccccattgtgtcctttccaggcactaccccctgcccattaaagggaaccagtatcctgactgcagtatcatagtatcatacattacctttttgtttttttaacattacctaatagtttaaaaagctattacatgactacccttttaaaagcttgcctttttttcagtctttgtttctgagatttatattgcttgtagcagtagttcatccgttttctttttctttttttttggtctccctgagatggggtcttgctctgttgcccaggctggagtgcagtggcacaatcttggctcaccacaacctccaccttttaggttcaagcagttctgcctcagcctcctgtgtagctgggattacaggcatgtgccaccacacctggctaatttttgtatttttagtagagatggggtttcaccatgttggccaggctggtctccaactcctgacctcgtgatctgcccgcctcgttctcacaaagcgccgcgattacaggcatgagccaccgcgcccagcagttcatctgttttcattgcttatagtgttaaatcataggactatatcaccatttatttacttatccagtagcatttgggttggtttctggtttgaggttgctggattggactgctgtgaaactgtgcgtccttcaatgcacatatgtaaacactcatgatggatatgtactccataggagtggaattgcaagactgtaggattgtgtgtatgttcagctttagtgaatgaaagtgccagacacattttccaaattacattcagtttgtatgaatttacactcctccagcagtgtaggagagttctggttgcttcatgttgttgccaacccttggtgttgtcagtctttgcacttttagctatttgactaagcagggagtgaatatctcaccgagcttttagttggcatcttcctggtgactaagtggagcattttttaaaatgtttattgaccatttggatatttttgtttgtgtgatggtagtgttcaaggtttgtgtggtttttttaaattgggttgtctatctttttgttttgtaggcgttcttatattctggttatgagagtagttttatattggaaatatctttttccacttggcaatttgccttttcgctttattattgctgtcatatgatgaacagaggtttatgccagcatttagggaatgtgggtgaaggggatgtgggaattctttgtactcatcttgtaacttttaagtttgaaatcatcacaataaaaaattcaggacaaaaagaattaatactatataattgatgtgttttgatgttttaagtaacagtatcttaaatatcactttctaattgcttgtttatatgtagaaataaagttgatttttttgatatttgtatctgacatccttactagattcatttcttctaatagtttatatgttctttgaaatctttttgtgtacacaattatgtcatctccaagtagtgaccattttatttatttattttctaatcttaatgccttttttgtttgttttttgttttgctttattgcacaagctaggacctctcataattaatagaagtgatgatggtagatatttcattcccaatcagttttaagggggagacttttactgtttcatcattaaatatgaggtttgctgcagtttttttctgtgtagataacctttatcacactgaggaagttcttctattctttgtttctagtgggtattgaattttatcagatgcttttttctctaaaacctgggggttttgtttgttgttttttctttgttgtgttaatatggtaaattacactgattgattttgaaatattaaaccaacatggcatttctggagtaaacctaatttctggaatatatcatctttttatatgtcactacattctatgtgtcagtgtatggtgggatttttaaaatctatgtattatgagagagattagttttatttcccttttttggacgttctggggtagggtttttctggccttataaaacaaattagaaaatattttctacatttttgttctctgtatgggttatcgttagattgtcgtcatttcttaatttttagaagaattcagtggccaagccagttgggcttagagattcctttatgaaaaggttttcaattatagattcaaattttttagttctggcttttcagatttttcggtaattcttatgttggttttggtaagttctttttttttttttttttttttttttggtgggaatgtgcccattctaaaatttcaaatttattgccagaaatttttcataagatttttaatgactgtaagacttcaaaattaagtgctgatactggtaatatatagtcactcttcttttcttgattagtgttgctagaatctatttaattttttttttttgagaacctatttaattttattgtttttttttcctcccattgaactaacctttagctttgttgatatatagatatttgttcttttccctccatgtacatttgttttctattgatttctgcttttgtcttcattattctcttctacttttttgggggattaaattggcattctttttccaagtttttgagatggagacttaggtaatttatttttggtcttttccaatatatgcacttcagtgttacagatttctctctaatcactttagccttatcccacaaagtttggtctcacatatttattatcatttagttcatggtattttctgatttttattttttattatgtacccatggattatttagaagtatattgcttaattttttttttaatttatagggcttttccaataatcttttaaaaatatatttatttcttaactgcaggctaaatttctagaaatggtattgctggatcagaaggtatggtgaatttctagacttttggtcagtatcaccacattaacctctaaataagagtataccaatttgtacttcctacaatagcatatgagaatgtctaatatcccactcccaccaataccaggtgtttttatttatttatttattttttatttatttatttatttatttatttgagacggagtctctctctgtcgcccaggctggagtgcagtggcgcaatctcggctcactgcaagctccgcctcccgggttcatgccattctcctgcctcagcctcctgagtagctcggactacaggcgcccgccactacactcggctaattttttgtgtttttagtagagacggggtttcaccgcgttagccaggatggtctcgatctcctgacctcgtgatccgtccgcctcggcctcccaaagtgctgggattacaggcgtgagccactgcccccagccaccaggtgttattttttaaaagttcttggccgggtgcagtggctcacacctgtaatccaagcacagatttaaccaggcgtggtggtatgtgcctgtagtctcagctactcaggaggctgtggtgagaggattggttgagccccgggagtttgaggctgcagtgagctatgatagcccactgccctccagcctgggtaacagcaagaccctgtctctttaacataaaataaataaagttcttgctaatttgataaggaataatgtgtctttgttttaagatatgatttttcaatttctgctttggtcatatttttactgaccagtttttcttttgtaagttggctgttcttgtcccttgctgatttaatttgggcactagtctgtttgtttataaggttttaaaaactctagaagaattaaccagatacctctccattgtagaaccacaactctgtgggttaaggagagatgatgagggtctgaactacactggcagagtggatccaaagtccggaaggtgggaggaagggaaggctgaaagtctggataattgaatatgaagagtgaggaggagagggagaagggaatgaagagtcctgtgcgttcactgtgatgcctgggtgcttactgaggcctttcacagagtttggaaacccaggagggtgaaggaatatgaaagaatgtgatgagtgagtttgtgggggtcaaagtgcctgaaatactttagaggcatctgtgctaggtagtcataggagtcaggttcttgctcaagagagagaggatgtagttggagagaaatttggggattgtctgcatataaactagaaacataaaagctcaaaaaagagttgaatagattgatggatttcgattgctcttggttataaaaaaaaccttggaaagcttgggttaagagtttggacttcctagaaggcaaccatgtcatttcacaaatcattccctgatacttttgtaagaaatgtattggataaataattagcttcatctagaatggtcattaaagtatgataagttcaggcaaatgctgcagacaatgaagaaaggaaatctgatattttcctaatattctttaagcatagtccaacatatgatttgtcggttttttcttttttttttttttggtcagtcttgctttgccacccaggctggagtgcagtggcgcaatctcagctcgctatacctctgccttccaggttcaagtgattctcctgccttagcctcccaggtagctgggattacaagtatgcaccaccatgcccagctactttttgtatttttagtagagtcagggttttgccatattggccaggctggtctcaaatttcctggcctcaagtgatctgcctgcctcagcctcccaaagtgttgggattacaggcgtgagccaccacgtccggcctgtgtttttttttttcttttagtttactgtcattaagacttctgacatatttattttgtgatcttgttacttctagattcaatatttgtgtagaaccagtcttcacctatgtatcaatctttcatccattcatccacatcttgctataagaggaagaaaaacacaaaaggaagagagatagagggcaaggaaaagcatccttaagatgatttggacttggatggacgggattgtagagtgaatctaagcgccacatctctctgttgcttcctctggctatgagggcagagaggtacttttttgtccctagggagataggcttgaccaggaaggggacctggttcatttcacccaggctgtcacggcttcgagagcacctctccgctctttccgtccctcgacagaccggctgatctctttgaagtgatgttgggttttggtttgtgcttcaggaaccgctgatactgatttttatctgatcccttctctttacattttaagtgccagattttgaggggtagtattatccttttaaaaagagcagagattccagtgttttagccaagatgttttcttattttcttcctataaatcctgtatttgcctagatgcttacaactaaaatgtgtgttatttttctttcctatcctaattggatatgagtaataatgtcggttgtaaacctttaagatgttgagagtagttgttaaaccccccatccagtcttgttgaaactgtaagtttctgagcctcctgattaagcagcacaaaatcatgggtggttctcctctgcgtcttctgaaataaattaacatgaagtgccatctcaaccgacagcataaatgaatgtgaaactttgagattgcacagtgtagtagagagtggttacggggacatagcccctggcctcactctgtgacctctgacaggtttggtcattgccccagtttcctcatctcgaaaatagtacagaggataagaatatttacctgacaaaataaccagactaaatgaatttaagtagctaagcacttaaaatagtacgttgtacataataagtactgtgaaagtattaagtgataaaagatcatctttccttttatagaattttgaactttaaaatttagtcaaatagcttgttttagtaagattgagttctaagccatttattcagtctaaaatatttttagtatcataatcattttcttcgtgtagtatgaaattgcactcaagaagggccatttggtcaaactgacaactgtcaagtgtctgctgtaggtatttcttattgttggtgtttgatttgtctttgatgtgtcagttttggctgatgagtaattgtctgagtactgataacttgttggaatcgagtgtagccctgagtactcagtctgaataaagcatttggtttctgtagcccagagaaccttaaatgtgacttctcttcattttagtctgtaaacttgtcaattagccacgttgaaaagtgatttttgactagtgctatcagtaaacatggaatcttttctgtgattgccacgctgattaggtaaattgtcacttgagaagctattggcgaagcttggtttacatggccttagagctctagaaaagggataagtttttaaagaccaaaggaaaaaattttccactctcgcctgtaccttctgaagtgcaattcactgtctcagaattttttttcttcctctcaaatgggtcttctgttagagccatacaaatgaatgataataagtttgttttaccatctacttcattacagatcagccaggaaatacttctgctttatgaatacttccaggttatatatgttactaagagccatatgaagaaatttggttaaaaatagccttgaaatatttctttgagccttttttctttttggattgaaaacaaggagtgttttaacagttgcatcagagtttattgaaagttttggaaaatttgcttaggttttaacaaaaaactgtaatttttgtatgtgctgagtttatatggaaaaagaaaattgtcctggaggtgagagatagaaaatggaaaatagagaggcacctggcacactagaagtgatatattagaaatgtttgctgttttttaagacatttctagttgtataggttagacaactagttgtataggttagacaattatttcctcctccaaaaaaagcatttacacttagtaaactttacattccagttctacttagaaatactgctgtgcttaatctaagaatagcatgtttgagtctaatgaatatatattatgggtggtgatggcttcatctccattagcacagtttctaggacaaaatatacaagtttttttcccatctttatttttcttaaaacattagattgtttctgaaggtttctcttaatgtagctgtatctttgtattgtcttcattcgattttaaatttattagggagccactgtggaagctttcgtaagtaccatggagaatgtgtatcctgcgattataccatacataaaaagacaccaggcaagcacaatatggaattaagtcctaatggtaaaaaggggtatgtttccagggtaaccgcagtgattccaggggatgtgaagtagaggggtccggatgaatatttgctgtatttcttttgacttctgttacatttgcaaattttgtatatataagggcactaaaatgaaatacttctgggaacattttaactgattctcactaaactaattttgtacatgagctgaaaaagtggctcaaacattgattttactttcagtagattactttctcacaaatggtaactcattgaaattcatatatgtaaatgtatcttaagttttcccatagaaataaaccatacaaatgaaatgattgctattattgtaagaacttcttacttttatctcttcagaaaattgattttctgatagtgtatagtctgtagtaatgactcagaacttactctgggcgtagggtggggaactgtcttcctctgttttctgtggagtgtgtagtagtcagcatcctccacattgttactcggtttgactgctagtagtttggtttttaagaaataaaaaaggaacttaattccaattgactaaagataccaccttttaattcacaatgggaatctgcctggaagtgacagctggtgaagggcttcctgcacctttctgagaggtgggtttggcacccatgggtatggctgcagaaacttttccagctggccatggactgatgtgggagtgggctgtggcagctgcagatggctgccctccttcaggtagtttgtccacataaggaaaactttcttcagtctggccttctcagcatgtcgagatgggaaggaagccagggctgaggctgccagttatgagctagaatcattgtgagcagctagatattttattgattccgtgttctttgtcatggggcttttaaagcatgattctacttttttctttctctctctttcttaagtaaaaaccatatatatttttggtttctaaccagagataagctttcaactcttcttttctttaagtaattttgaaaagcatttttctagtttgtgtttctattaaaatgtgagcctgaatacattatggtaagcgttgtccttggtctcgggagtctagaggaggttactgtcctcacatggtgaactcattagacaacttctggaaccagcagttttaattaggtcacagcagaccccgctgaaggtgaagtgactgcaagctgtggttcgctgatatagacaggcccagatgtttctttcatcctatatccgtcagtttatgtagaagagcaggagccatttaattgtttcttctagttagatgatgttgctagttcagctttgcgttacaagaaaactatcagaaaagatggagaagtgggtggtcccttcattaatgtgttttcttggtttgtgttggagagattgtgtgtgctctgcttaatgttaatgaaagcaatttatgccttcagaaggaaaatttcaggatttctgttgtagatactattcattcagtttgtattaattctatttatggaaaagaactaaacctttccttttccacagcatttaaaatataaatgtaaaaactgtgtgtaatgtatgtatctttacttacacacacatacacacacacacacacacacacacacacaggattatgtgagtttagtgaccaggggttactaaacctattttgttatcaaaggaaaaataataaaaaatttgctgaccttgttagttacttacctttttacatttgtggtgtgtgttattatgatactagtttatttggtttacagtctttctcagatttttttcaagaacttttaattataaaatattgggtagttgaatattggttacttttaaaaatcttcttaaccctttcctgtttctttttcagatatgaggccccaggattcctggcgaggtcctcctccccttttccagcagcaaaggtttgacaggtaatattaaaagtagacatgacttttaaatactttctgacaccaacatttggggtttatggtttttatggaagctaaaacctctgtggtttgaaatgtactttttcccaccaaaaacaatttcccttgtgcctatcctttaagaaaatatatagctaatactttgaattaaaagactcatgtttaatatactttcttacttttcttggttcttggcctttattttattgatgcttttgagatgccctgaaaaatgcaacacagcttaaaactgtattaggttttggtcaggctaaacaaatttctttttagaagggttgtgcagcttaatgaggcataactaatggtgttccacttttatcatttctgtgcgggcaatgcagcgttagtacagaccaaccattgattcttgctacaaacctcttgaagtcctaatcagcttctttggtacaactttttcagggctgacaagcctattgtagggcagtgtcactgtaggtcagtagttattagttgccactgaaaacagtttctttaactacttaagactgaactgaattaaacgcagaagggactcagaagaggattatgggatctgcagtctaataagtaccatggactaggaagaatgtgacatggtttaataacaagggatgtttaacatgtattccttcattgataagttgtgtgctcctaagtccgatggactctgtacgacaagacaactaggcacattatgaataattaacatctgtagaataatttttaaaggccagctttaagatgtatcatttcatgatggttttgccaacatcagtaaatgcaaaaacaaattaagccccatcataataaggctttcttttttgccttcccagttttaatctgttttattctcttctcctctgccatgtttacagtctctaatctgttcacatctgaaatgaatagtgtttttataaatgggattctaaatgcagcttcccttttaagaaaactttataactctttagagactccagaactttatttcattgttatcttcaagaggataaaaggaatcatgttattcgatgtttactaatagtgtcaacttagtgcaagtctcattaaatgcaatacgactagcaatgtgtgtattaatgttttgattttagtatatgttctgaaagcacacagtatgtgctgtttcattttcctcagtaccacaaattttaagcagaaattaagtaagtaaggggtaaatttttcctaaattatatacttggtttctctatcttattgctcactttccatactaataataatggcaaatgtttgtctgcttacaaagtgttaacactgtgttaacatcctttaataagaatgatttcatttattcctcctagcagtgcattgaaatagatgctgttatgtttacatttttgcaaatgaagaaagtgaggcacagagaagttcagcagcttacctaaggtcactcttttgtgccattctttaccaagaaacttttcactggaacaaaacttaccagaatatttactctgagcgtaatataaagacgtagggacttcaaaggaagtaaaggatctgtttccacttctaaggccccaacagctttcctcccctctgttcacattaaaagttttcctaagatcatcatcattgtcccttcccttaccctgctgtccatcaggttttgttcttattctaccctagccaagtactagtattattctgactttgtgaacccagcaggttagtgacaagttttgtgggaatgttttttggtttagttttagtcagatacttaaaattatgcctgaaagcaaaaggtaaatgtgagcataatagagttctatcataaaagtcttacatcacagacatttaagaaagataccattttgttccagaaccaggttttaccagttcttagttcagtatgtttccacgacgctactgtttgttgagaatcctattaagagaattttgagtgtcttttttttattacattgcatttcttgaataatttcctactttaagatggtatgtataatccatatatccagtagatttaaaaatacaacaggaacatcctcccaacacagacacagcctagagttaatagatacccagcattggagttccctttgtcacttgagttttgccacattgtttgggttcttcttgtcaatggaggcctctttttcagtcatttgcaaggcagccatttagttttttacctatgagtgttaagctcaatcatgaaaaatcttttaaataaaactccgattttaccatatgcatacatttaaaatattcaaattggtagtagttcacatctccagtaactttccaaaacaatttggaaacttaaaaaaattgttgctatctacgatgccaaatggctcaaataagttgccttatttattaacttcttttattgatttattgattgagacaaggtctcactctgtcacccaggctggagtgtaatgtcatgatcttggctcactgcagcttctgccatccaggttcaagtgattctgatgcttcagccttccaagtagctgggactacaggctcccacaccaccatgcctggctgatttttgtatttttagtagagacggggttttcccatgttgcctaggctggtctcaaactcctgggctgaagtgatctgcctgcctcggcctcctggagtgccgggattacaggctgagttactgtgcctggcctaattgctaatttttagaatttaggatatgtcagtttctgtgcttctatcccagattttaaaacataatttcctaggcaaatttttagttttgtaagtatttgcaaaatatataattagtctagacatgtgataaacttgttgaaaataaaggcctttctgtcataaaagtcagaagaaggtagtacatgacatccttgctttgttcttctgtttaattttaattattgatgatttttttcataaaaattatatttgtcaaaaacattataagtaatcaattcaaacaaaaagaactttgcgtttttaaactgtggctttgttcttaacctgtttttggaacataaaatagttttgaattgcatttataatgtatattatttatgccagcagatcttcctaaaactcaattgaattttattattgtaagactcaaaagaaaaactgatcacagttaagatgtgaattgtgtttttagcccgtgggttttgcattaattggcccagttttgatgagactttggttacagcacaaaccttagtttagcccttcactcctgcagagactggaagagaccattcctatctctgcacacggagctcttcttgctaaaacagatggaggcattcttgctaaaatatatttgtgctagtaattgtcctgaaaaataattaaaagccctagccatatgcattttctttctgagataaaaacttatttttaattgtattctgaattacttataacacattgttattagagctctggtttcagctaccaactgtaaagaaaaactttagcctttctagagttctttagagagcagttcatttcttcgaatcatcacacaaaaataattatctctggtgttgttttaataaaaagaaggcaagctccaagtgaagggaggagagtgggggtagagaggatggattcaggcttgaatagctgtgagaagaatgctttacccaatgagcccagcgccgggcttttttcccctaagacctcggaagtgaaattcttatgctgatatggttataactgattaccagctagtcagcacttcagtgaatttaaagttttattgaattcctcctaacatggtcagtggccccaaagcttctgatgttcaagtatactggagcatttgcctctgtttattctttgtagtgccttccataaaatagaagttatggaaagtgccttaaggagaaagtaaagtcttaaatggtgattgcctttagaaggtatatccttgctacattgtttatgtgacagtttttaattaagttatgatttagtacattatacctgttgctttgcatctgcaaagttaaaatagtcacttgaagacaattaaaacatttctttcgactagtaatctgcgacagcaaactgggttataatagccgttgaatctgtgttcccatgtaaactgtacaccaaatgccagtcagcccatgccaattagtgctcatgttgctaggtcaccgtggtcaattgaaagctgcatcaatagaacttgaaaaggtttcctcccaatcagaccttctgacatattgaacagaataatggatgggaaaaaacagccaagtctcctaccctggattcaaaatactcagcagtaagaattcatttgcaacctgcaattaagtagaaagaatggatccaagaacgagtctggacatttttgaaaataaagcctcattctcctgtcttgtacatgtttactctttggatagcatcttaaatgtagccatcttggtgatcttgggtctacatctttaagtgactaaaaaggaaatttcccaattgaaaatgaacaaaataacttttaaaagtcagaacttctcagttgagtttaaacatccattgtaataaatgctgatgcttcatgaaacatgttagattatactggatataagggacacaaaggccattctgatactctgtatcccatatgataaatccaggtaaattggattgtactaaaatttggagatgatacctgccgattttaggctttgtgctgtataataggtgtggcttctgatgtaaaactggtactttcctacagaggcgttggggctgaacctctgctcccatggaaccggatgctgcaaacccagaatgcagccttccagccaaaccagtaccagatgctagctgggcctggtgggtatccacccagacgagatgatcgtggagggagacaggtaaatggttgtgggatgaaaagtatactgctcactttatatttcaacaagcctcacaggactccgtattttcttaccaacatttctggagaagacactgatagagtagcttagagtagcttggctgaacttgggtctgtcattaaaaatgtatatgggttgagtacctgcttcactaaataggttatataccttgaagatgccaaagaatttctaacccaaaagccctttaaatcatagcagtcagtgataattagtccaagtatagtcagtcaccaaaacacattgtttttcctttaaggatattgttcttcaatagaacctagatccctcttaatgggtgatgattttctggaagctggaaagtaagtctgctttttcagctgttgtcttttagaagtcattttacaatgttgtcattttagaagtctcctgccttgattcatctgatatccctcctcataaaagaaatttctgcttgataatcttccacatatttttcttctcaatgtaagcagctgtatcactgaatgactatcataattcctagacaaatttagtatatgtaagcttcatgtccttctctttacagcatccagttttagcagcatttaagactgaggtctatttgacataatttcctccagcaatttgacaccctggccagtatttacatgctcttaatggaatccttactagagaacaagattagaatgctgtgattcagagtaatgtgtatggagtttggcacctgcagtgatgtgaagtggtttttaaattgcttacctggtgttgcctccaggccttttgcagtgcttcacatattaattagtaagacctctcttctcacagctaaggaacatattttgtatgttttttgatgtattcttacaagtatctccaccttacaagaagataatcaccttaattgcaaataatttcttctgagattttgttacagtttatttgaatcagtttatcgaattttgctttgaattctttcagcccaggacctctaaaaatcgtgtcagtgaactaaggctctttatgttactatggttagatggcactaggccgtttcagtgatgagcatttttgaagtgaggactatttgtaactggaagaaaccttggagaatgtgtagtctagtcacctcattttccaagtcaggaactgaaaccctgaaaaccccacacggttcagcaggagaactggtagctggctgcctagactgctgaccccagttcatccattttcctctctcctttggagatcttccttttaaaggaactctgtgctgttacaggaggtaaaattcttatttacttagaagatataaaccaattggtaaatttattattcttttaggactttttgaaaataacatttcttctttctcagtccctttgccagggagatactttttattaaatcacaattgttgaagcactattaaattgcagaagtttgttgttaaaaacatagaatcattacttcattgtatttttagtaaagttttatatgaccaaacaaggccttagcctgcattctggccttgagtctgcacatgttcatgtttaaagtactgaagtgctctctgggtggcaaaatgaggtgggagggggttccatttcaaaaccctagaggcctaggaaaggacttataatgaagaggtgtcaggtttatcttttgttatacagaaatgttatttgcaaacatactaggatatgttataaaggtcacggctaatggattgtgtaataaccttaatatgtcatttaaagccctactatttgttgctaaataaaaaatccctaaaatcaattgctcatttggccttaactgacttagcaagctcttgccttggttaaagcaaagttactttccttgtgtaataagtctaaattgatgtgggtatcttaccacaaagtgacttgaattactactgctaggacagtgagaaaattgagaaccactgtctgtacatgttgtttacacagaacactttagttatttgtgtgcatttgtgattgttaaggttttttgttttatttttcagtaatagcatttgtgctagcctccaactttgcaacaagtctgtattaaagctctggatcaaagcaccttttatggggcctttccatgtgctgtacctttaacacatactcagtttccttatgatgtgtttttccatagaggtttaaagttaactgacttgcaggagtatcggtccagaaaataaactctttcttttgtttattttcagggatatcccagagaaggaaggaaataccctttgccaccaccctcaggaagatacaattggaattaagcttttgtaaagctttcccaaatcctttcatcattctacagttttatgctatttgtggaaagatttctttctcaagtagtagtttttaataaaactacagtactttgtgtatttcttttaactgtgtatatttctactgatctgatctcactgtttatgttgctttccaaagatgtatgttgcataatacagtggatctgaatttattattgcttataaaacacatttgatggaataggagtactggtttttcataatggttaaaaatgaaaccagctgtggatttcaaaacacagtgtattctagatcatctaagatccatgctgatttttattgcacaagaattaggtttgaactcgagctggaacctcagcaaactagagtatatattgttcagtatttctttggaaacatttcattaatgtacttgtcttacagaaatttctgaactttagtaaaaaaaaataaagttaaacttttaaaactctgttttgtgttgttattttgcagtatttcaactttgaaaatcttgaccaagcgtggttttttaaaattaacttttgcagaaaactatttctgtaatcagatgtccaaaccaaaggacaaagaagtcaatgaagaagtagattttaaaagatagggtcagcaagacataacaaaagctttaactttgttgtattatgtcagtgactgatctggctaactcagaaatctttgtgagataaattacatttttacaaatttaatgtagacttctccagttttaaggacttgttttaaatcttcaagttgacaattttaattaatggccaaatagtctatgctccttagcatatttttgtatgtcattagattgcaatttgtactcatgtttttccttgctactaagtacactataaattgcttaaatgtgtgtttggagttcacatacagcacttacatatgcattttcatttgattgccaaaacatatttagacacacatacagagactattgctttgtttcagtttttccctcctagcccaagattgtgaggtaaagcttctctttgacctcctgacttaggatatttttgctttaatattcaactgaagcacgcttgttaaacttagtctgtgggaaaaaaaaaaatctcacctcaaccttgaataggaaggtattttgtagctattgagttcattgctaatgatgggtgaccagagcaggatcctttattgttgagacaaagagtctctccatcaggaattaccaacccaacccttacataattgccttcgctcaacattcaagtgataatgccttctattaaatttctctgtaagtttatctcccaaatattaaaaatgtagacagccatctcagtaaagcattgcatattctaaaggagcttataaatgttttactgtttatagttcatagtcaaaacccacaattccactctttatattctcagacctttagttttggcttagttttaagctggcctgagactgactcagtttttgactgaatgtttaaagcactgtttggaagacatctgagcaaaaggcctgatggagaaactgatgacggcagatttcctctgcagaactggcaggtgttccctcgctgagccggcttcaggccctgctccgtgacctcacccttgcttcttcctctccatccttagtcttcatctctttccaacttggttccgcgtttgaatcttccaggaaaatgccctgcccatttcaatcagcaaaatgcttttcagagctttaatgtttaaagctgtaaatatctcctccaaattctgatgtaaaaataaattcgttgggccaattttaagtagttacttgtacgcaattatattctctttaaacggcacattttttcagggtctcctgttaaacaaaatcttagaacctggaaacagcctgactactctggggctaagggcccgtaatgagcagttgtcttccctttaaagatcaaatggggtaatgtatgttaatgtacaaagccgtctacaaactggtattagattgccatttagcgttacaaaggcaaattgggtgtaatgagcgataggttaattttcgtacgatgacgtgggatgccaggaacgggccgggtgaggccggggtccctgcactcctttgctgggcgcgcctggaccgaactgaagggcccgggcgccgcgacctcgcagccgggggcgggatggtggcggcgcccgggccccgcgtgctactcagagctcaggtcctaggtgcttggctcaactttctcccagcggggtcgggaagcgccaggccctcggtgcacgtggggcacgcgcccggcgcctgggtctcccctgcggctcgctagtcgcccggcccagcccgcagaccccgcggctggccctcccgggagccccgcgagccggccgcacgcacaggatgggcgcggaaagccccttcctctaccctcgggcgcaccctccttcctcgtccgcggcgccgcagcttctcaacctgccgctgcatctcaactccctgcaagcagcagagctgtagaataccagaaatggtcttccttccgaggctgccgttttaagttccaagtgtgaaagtaaccgaattttgctatgcttagaaatctaaaatctggacattccctgaagagtcaacttagagtccccagtttctcgatctggctccgtcccactgactgacgcctcctgcccaccccgaaaggatcctggagctgcgatctcgccagactctattcctggtgatccactgctctgctatttcccatcaggaaaaagtcaccaaacgaatgaactagcaaacggcccattctcgatggatttctcctccactcagtaaagcagaatcctcctgtggcttgtttctccacgccttatttatggaatgagggccaaaagagaacaggcttgaattgatgtgtatgaaataggaatatagctgttcactactgcaaaatagtttgcacaacttaaatttaggcaatgttcctagttcctagttaaacttttttagaagtcacctaaacaattactgaaggttacatggaatttcaaaaaacgaaaggcatttcattcaattgcaagtaaacattctaaagcaaaaacaaaaccaaacccacctctcccagaaacttccattacctctaaagttaaaaataataaaaacaaaagtgatcctgaaatcacaaagttatctcaatacttactggagagcgcaaattcctgatgggatgtgaatgcagttccccagtctaggcatcttctttgaaacttccccagatgttcaccaaatctcactagtagtgaaagggtatttatatttttaaaaatgtatcatcgttctctgtctcactgggttgcaggataataatagtgtttcaaaaaactgtactcaaataattaacatacagggtttcatccacacattagtgttatggtaagcagtgagggagtattatccatgctttgaactgtgtctgcaatttgtgttgccatcacataatgcattattttctcttcagcacaaattcacatctaaaaatccaattgataggtctttatataattatggctcacaaatttattctaaaaagtcttttaaaatcatcagtattcaatggagttaacaaagcaagtctatggaagatgcttgcatttagtgaacaggattgagtctctgatttgctttaaattgaaagtaaacagtcgctagccgaatggagattgaacacaacatctgtgttgatagaagtctgactacttgttctgaccattaggttttagttctaggcaaagacttaaatagaagacaactgggttacacccccatccttccatatacaaaacacccttcttgtgtccttcaaaactgcacacactcgcacacacagcacttcaatatacatcccaacacagattacagaaaagtacctgcaatccctccgttcctctctgcaactttgactctggcttttggtttccgtgcctcaattggaaaaggtaagttagattgttgtaaaacccaaaaacatttaggaaaaggtcacatctgctgagtaagcatttttgaaacaggtttgctgtggcctctgccaaactttgaggggcctttgttccactcagaccctgcgccagtcctccctctcagttgtggagacacttatcctcctcttcagttaatgagtttcacctagtctggccatttgtatttttataaaagatctgcaaagcactaattgcaaaaagaagaaaacagctcgttttgcattaatcagaaggtgggattctatggtaaaaacatttctattttaagcttcaagaatcaaacctttccctaatttcaggatatgcacacatacagtcagtcagtctctgggtatagaatgttaagccctttgcagcaattatttctggcttggggttttttactctttaaaggaatgctgaaaggaataagatatgcccacacaaaatacacttccagaaaatattgtatataaaagttgtttcttcttaatgtgacatatttcttaaagaaagtgcacttcttcagtctaaaggattttgttccagaaataaactgttcatgaagactcattttctttaaatatgttacccggagcccttggactataagctattattgtttttgtaggtattggactgtaacaaaaaacactgccaaccatgtgggcttttagaacgttttctagaagtaaaatttcagaattatggtactattgtgaggaaatcaaactaatataaacaaacattttgaaatttggcacatcaataatagatttgctagcttagttaacatttctaaagtcatttccattaatatgccaaaaacaccccaagttgagagaatttcctgtgggtgtactgtagcgttttcttacaaatttgtctgctcagattatttgttcttacataaaatgttttaaaaattagatctcattttctaaaaattcttttacggccccttgataaagggtgattcccttgcttctttagtgttttttctccctctgtgaaagaaactggagttttaaaaaattactatacaagagtctagaaaaagtgcaagtttaacttctaaaacaccttcttatgaattcaagttgcacattcagaaaaatgttctaacaatgaagtgaaacacaatgtttcagccccaagctgtaattctaaaatctcaaatgtagaagaggtttagggtctccggtaactatttgttttgatcatttgcaaatcatgctttatccatgttatttctttaattttcattaattatttataagcacaaattcgtcagcttttagtatttttagtccactaccagtcatttatgagtaaactgagctgtgttgtcacatcatgacaattagtattttaaaaacacatcaagccatgtataaacttaatgaaaaagaaatgaccacttgacttttagaaaaaagaacttgtttcttttaagttatatttaaatatccattagaaacataggaaatataaatcggcatattaaagagtaaatacattatttgtacaataaaacaccaacaaaaccagtgcaactcctaagttctaaatatggtggaaaaattatattgtagttacttattccttatatcttgattacaattcaataaatcacctttcttcttcttgtcatgctttgaatatagattaattgatgtcaattttagaaattttacttgtttgttctagtactttatcaaggtattcaaattcagacaagaaaatacctcaaagagagtaaataccatgtttacagaaggatagggttatttattttctcagttgatgttgggagaccagatttcatatacaaatagtatacaacctttcttatggtgagctgcatcttaggggggaaaatcctcttttagcgtaacatacaaacactcacttgccaaataatcatcaaaacattttgaaatcagcattaaatttaaaaagctccatcaatccatataatcagtattttattttgattccattgctctattacctaaatggcaataattcctctgcaataatgttgctatgtgtatgatccaccttgagctacacttcaatttactttcaatcaaacattaatgaaattgcacttagggggcccttcgaaaattaatctcccaagataaattccacttcaaaaaggactgattgttaaagctgggttgatttttatagttacaaacgccaacaaagtttccaactttgagagctgtagttaagaatgccgtgtgaacttctccaccttttcgcgtcatttaagaacttctaggaggagaaaatcaccacctcaaagcctcgtggcataatgttacactactcggtttccgggctgtcgctgtcccccgcccccagcaagaggttcacagcctgctcctctctgagaccggttcgttttgaatcgcagtttacacgcgcgagtcggttttcgcatgcctcccccatccgttctagcagtttcttgcagacccttcgggtgcaccaggacctagccccggggcgccctcgctgtcaccacgtcctgccatagagcaggttggcgcccaggacgccgccgctgtactccccggcggccgcgtccagggccgccaggccgccccccgggccgtgcagcgcgggtgggctgggcgacagctcctccagctcaggtgctggcgtcggggccggcggctgcggaccggcctggccgggggtgggcgtgctggcgccgttctggcacggcttgccgtccttgaccagcacaggcaccgccacgcggcgcggggacggcggcggaggcggcggcgggcccaggccgccctcctgctgcagctgctgcgccgccttgtccttggcctgccgtttcatcttgtaccggtggttctggaaccagatcttgacctgcgtgggcgtcaggtggatcatgctggccaggtgctcgcgctcgggcgccgacaggtacttctgctgcttgaagcgccgctccagctcgtagacctgcgcctgcgagaagagcacgcggcgcttccttcgcggagcggctgccgccgccgccgcgtgcagcgggcccagcgacttggcggcgtccgcgatgccggtcagcgaccccatgccggccacattcacgcccgccgacggccccatgaacctggagactggggaagagtcccaagggggaaggcgagtgagctccaggcccgccgggagccggtccagccgccgctctcttcacgccgcggccgcgacgccgccgggccctcgctgaatcccaagaccccctgaccgccgcggcctccggccccagcacgccccgcgcgccctcggcgggtcccagagcaccacgccctcaacgggtcccaggacgccgcgcgcgttcccggtcaggtcccaggaccccccgcgcgcccagggtccccagaaaccccgcgcgtcccgggccgcgtcccaggacgccccgcgcgcccgctcggccccaggacctcctaagccgcgcgcaccccgtcccgcgcccccgcgcccctcggctgtggcgggaaacgcctgagccgcccgcagccccgcgctcctggcccctctcacttgacgagtagcgtgggtccgggttggcgccgtaccagccggtggccgcgccgccccgcatgccgtccgtgtaggcgggcagctcgcccatgttgcccaggccgccgttgcagtagctgcccatggcgccgtgcgggaactgcgagacgccgggcggcatgtggtaggtggcggccgccgccgccgcagctgctgccgccgccgccgcggccgccgcgttgtgacccgccatggcgtgagaaggctgcatgcccgccacggtcgccgcctgcgaggagggcccaggtggcggcgcgcggtaggcggccgcggcccccaggggcgcccccaggccgggtggcgcgccgtccatggcgccgctgaacttcttgtaggtctcctcgatggggctcaggatgtcggacacggagaagggcgtcgtgtgctttgggctcaacgacatggctcggcgggcagccaggtaggggggcctggggcgcgcgccggcaggacgcggcggccgctcgtcgccgccacctcggccgcggcagctgagcctgtgacgaggagtcggcggctcggcgagccccccgggctgcgggatctggggtttattttagtccggcgccaggtttacgacagactcggggggcggagcaacatcccaaacgagcaaacaatggtcattgacatctttttctctcgcccccccaacccccgccccataatggaggcaaaaaaaggtaaaaggggcagttgggtgtttcttggaaagatcactccccgttgcttttcccatctttgcttttcccatcctttgcttttcccatccttcgctcctccatccgcggccgttaccccagccctcgagcaccagaaatagaaactcggaggctggcgtcgaggctagacatggactccgcgcctggccccttccagatcccagttttctaaagtgacttcgcaccaaagtccggtataattgcggaatggggaacgtgctgctaagtttggggggagggtgttgcgggggcttgcttcgtcctctccagttatcagcccctcattcgctccatcacctaaagtgttaaaaaaaaaaaaaaaggctcttgggtcccaccgtaagagcgcataaagagaggaggtacaatgaccgtcctttgccattgtagggctccctaatttatgcgtttttagacccttaagcatcattttgtgggcaaccaaacgggcacttccaaattagctcaaagtatccaagcccagagaagagagaaaacacacatacactgataaatacgcagatgctaacttgtaagtattctgtttttcctctgtggggatggaaattgaacaagggaaagagggggaacatttttatttcctaaaatgtttcctactgagtttgcacttgtaaagttttttctgctttctttccctttgtgtgtgttcttactctctttctctcagtaaatatctctgacttaagtttattctcccatcactaccgtgatcaaaaagaagagaaagacaaaatatcaaaacttccaaatatttctagttgttcgcaacgggtctttttgttgttgttggaaaaatataacctgttcaagcgatatgaaaatggatgcagaaatcaggtgaaaattgtagtttctttggaaaaatacaaaaccatagataaacagatttttaaaactttgtcatcctttgacttgcagttttacccgaatacttagacattatgaactctctactaaatactgaacaagacaaagcataagacaaaagcagtgtgcaaagcatattgattaaattttgaaaacaatcttgcagcaataataatgataacgagaaaacaaagataacacttttaagttttcctggaaactggagcaggagaaagaaaaacaaggagagtgctttcttaagcaatattttgttttattttttttccagaaaagggtgtgtggaatcgatttaagtttaacctgacagtacatgtcttgaaggcaagaacagtgttacatattcctttttctgtttggttttagccctttggtggaaatgttctccatggttttgttcttaggattttaataattgttttgttcaactcagtatggttttgcaaagaatctgccctttctaggggggaaaaagccataggtcacctgtgggaaggaagtgacagacgaatgttaagagtaatgttttaatatactgtaaaaataaaatgcaaggttacaggaattgtttacaaacatcagtattgacttagcaagattaatattgctacagttttaacacgatgctacttttacaggtcttttatgaacttgaaacacatcggctaggtcttcatcctcacctgcactggaattacctacttaagaaaaacaaactaatgatacacaaagaagcacttatgtatgtatttaaacacttgctgggatccttctgaaaactacagtttgaattttacgtttccggtttagtttaaattgtattgtttacttgtatgtattagcttaaataaaataatagtcatttcaaatgtttctcagagacaacagggtaagtaaaaaatagttgtgttatgacatctgtgaatataaaagttatttgtggcccattatattttatttttcaagttcaaacgtatttcaaatatgaaacgcattatcataatctccatattgattagttgtccaagttgaaaagtgtttacaattttaattttttccagatgattattactctgttttcaggctataaatttcatctcatgtaattttctttgtagaactttgacatagcagttaacatcaagtggttgtactacaatttttgcttattttgtttttcaactgcattgggtcctgttataagtgcatatacatctggaatgcttccatctttaaattaaaagcactttatcacatctgaaggttctctgcagagagtcactttctgactgcttaggaacttgataagccaaatagtattccatcactgtaggtaaacagttctgggaaagaaaaatctacagtctttgacaattcttcctgtcaattgtttgtacctcattctagaaattacatatcttcatgccggaaacactatttggatgcgtgtggatgattctgaaaattgatatagtctgaaggatgtatatgtacatttatatatagacacaatataacccaattgatattccattgaagctttgtattcatttcatcagattatcgtgtacctaaattatgtgtggaaatttatacttagtagattctcaaatattattggctaaactgcatttcacaggaaatgtatttctcaggagtgttttctcattgttttccttaaaaaacaatgctggcacccagcaaaataataaaattaaaaaataaaataaaatgcaaatactgcctaagggaatacagtgaaaagaattggttctcactctcctatccttcaaggctcctagttcttcgcctcagaggaatttggtgttacctgtttcttttggaatggcctgtccatctagaagcatactaccattttacacacaaaagatagcatgctctatgtgatttggtaccttgcctttttcatagtttaggtttttatagtttcacacattgcaacattgaaaacagacgaagataggctgtggcagatacagaaattttttctagacaaaaagacaagatttctctagacaaaacactcctggctttctggcaaaaatgtggtatttgttgaaaatctctgatgtgttagatagccttagtgccaaaaatatttagcaaaaaaattctaaggaaagagccttctgcagtttggatttgctcttggcagacagaagctcagcgaaagggacctgagaggagttgagaaacttctgacatacccactttgaagtgggggtccagccagtacttagagggaaatattgtttatctaggtggtgaataggttttcagtgggtcttgtatttcctcatcaagactgtttgaaaatataactttctgcttgatacccaaaaacgtaagtgccttttagaactgagacacttgctacatttgcaattagtttaaactagttgtgcaacaatttgattaataagttttatgttgtggaagtagccttaaaatattgtctttgcagttgggaaggaataaagaaacatcttaaggatactagtattttgcagcaaaatttgaggttataaagaggaaaataaaactgccatagagatgaaacacaaagtttatttgaattattttacttttttttgctaaattcatcagtttctgagatctggttctcatttctttttagtccctttataagcctttttccaatagtgttcatttcaattattttaaatgtcttacagtaattttacacttgcatttataaggctttgttatttctatgtgacacagtaatcctttcatattttcttcacaaaatacaaactcctggcagtttactcaaaaaaatcttgtgatccttttcctgagattcagatattttagactgaaaattgttttctgaccaatgataattggtatcaataaacacattttaagctaacacaattgttagtacagtgtgagaatgaatagtaggtaatcacattttgttgtcaaaattattataatatggtccaatgaaatgattcctcctcccatccccctaaggaaaaaaacaaacaagaaacctccccttctagggtcaagctgtaacactatagtttttacagtcagagtagagaataacactgggctataacaggggagtaaaaatagggaaattatccagtgtgtcccaattctctcaccctaggattaggagcttgagccacaaattcaaatttttctatgttaaaaatcattttttagagtaataatacatgtatgggaaaaacaatggcaatattgaaatataattttttatttctgaattacaagtttattgtatattttgtgtatatagaaagtttaaaatattttggaacatagtggtatttccattgaacaacattttttagatgttttggagtgtcattaaatggctgttttataggaaaaagaatcctctgaattttaaacaaaactatatttctgttggttattttgtgtgaggagttagtttttctaagtgttccaccatgtttccaacacaacctaattagagtaaatacacaaagcttttaaaaatacttactttataacttctcacatactgtcacatttttcgaatctgagatttagtggctttaatgtaaactctttttctcctacaagtctcattaaagatgtgtcatcttgcatttacaaattactttgtaattatcaaggaaggtatcagtttttaacatctgggctgagtaattgggctgttgccaccatcacttacttgaaggagaactccaatttttgatgttttggtaaattgattattaggttgttggatttgttaataaaaagttttactgtgtacattttagaaggaacagctatgacaatatagtaattagagaataatttgctcaattttgtccccttttgttcttctgtgtactactaatgttgagggaatagttgacagatacttgtattcacatgtatctgtctgaattgtaggttgagaattgttcttaaaaggaagcaataggctaatgtttacctcataaatcaatgcaaattttggtagattttaagcaatttattgcttaataatttgcattaaaaagcttaatatgaaacaatttcattaatctactttcttcagacagtaagtgccacaaggaaaacctgactaataaagttgccttataagattttctcaagaaaaccaaaacccaaaaaacctaataaaatgagagtctcaaaccacaacagacgtgtcagatggacttgaaaattactgattattgccccagaatatccagtttgtgaaataaattgtgggatctgactctagtaaatctagggtttattataaagtttttaaaagtgaagtactaaatgtaaaaggcaatttgatcttgtcactgtgtagggaattacgtaggtgtaatactgaaaaggtgattcaaactggtgtttgtacttttagaaatcatggaaattacacaaaaatgtcacaaaccacagccattggaatttggcctgaaataccaagccagataaatgagaattgcttgagaaaatcggaaccagcttaaatgaaagcagcttatcattggcatgtagtatgtcttttaaaatgtataattatctaacagaaggaaaatagaatatttggagtagattacctcttcaaaaacaaaaagcatatgctatgtatccaaggtaaatttttaaaaaactaactcaaccctaaaaaatggcaaacttcaatgagtgaaagattttttaaaataacatattcaaaaaaatttaaatcaaatttatattttttaaagttcactttttaatgaaggactaaatcttgaactgtaaagattatattagggttaaatgttttgcataagttattgttctaggatttggataatagaataatttacaaggccattgtttcaatacattctttatatgtttaccattacaaacatataaacaaaatactctgaaagatctgaatggaaagtattatatgaaattttatttttctataaatattgaggtatatatataattattttttgtttttatttcttagctacatctgctggaatgagatgtatgatgatttagagttggttctcttaagtgcagtatttctttaggataatcagtgatagtgcatatatgattgagctactgttgtgaacataattgatggcagaatgccttgatgcagctcttaccaacaatttatggagattaaaagggtggtagaactggtgggttagaaattgctttctaaagaactggaggatcgaagagaaacctggggtttccagtgccctctgaaataatctttacataaaacccaggtttagtaggtacaattgttgtttaagtgcgctgctcatgaaaaaaatttatgtggcagaaatattatttggtcatggatattgtatgaacaaatcagggcttctgtacccatgttaaaggaaaaatggagaatgttctgtatatttaatatgcacatgtgattgtatttaactttataggtaataaatgatacaggtaaacacacttatgaagatcaaacacatttcacgcccaagaaagtctaatcacgaattgtccttagcttcctgtatatggattgtcccgtttccatatgttcaagcaagatgtatctctctcacatagatatttttacttagagactcaagaggacatatgtaaggcaaaaaaaaaacataaacatttattcttcctctgccttgatatataaaaaatctgaggcagtttataaataaatatatttgtgcgctttaaacatttagtaagactcaagacctcataaataaggatcttataaaagagtaggaaattaagatataagttgaaaaaacatcaactaaacaggctataaagcctactgaattcctatagttgagcctcacatttggctctaagcttcctcgtggtcaattgaaaaagtcagttatattttccttgcatttaggaagaacaccctcccaatacacacagacatacacacaacatttctcaaggaaagaggcatttcctaatactcagctctaaaaaaaaatttgtcatggggcttcatggagggagcactgaacataaacatcttaatagttctatagcagatggaattatttttaaatattggcttgttgtagtggccattcctaaaaagtctgagacctcaacatcgaatcatctcaattaaggactctaaggtttaggaacaaaatatggttcaggtttgtagccttctgattcaggaatgcttcatactttaaaaaaatgacttcatagatcatgcctataatcccagcactttgggaggccgaggcgggtggatcacgaggtcaggagatggagaccatcctggctaacacggtgaaatcccgtctctactaaaaatacaaaaaattagccaggtgtggtggcgggcgcctgtagtcccagctacttgggaggctgaggcaggagaatggcgtgaacccaggaggcggaacttgcagtgagccgagatcgcgccactgcactccagcctgggcaactgagtgagactccgtttcaaaaacaaaaacaaaaacaaaaaacaaaaaaaaaacttcatagaaactacaacatcgtttgatatcctagttattagaaagttctgatactgaggctaaataggtcaccataatttgcaggtaacagtcctagatcagttctttgatgccaaactaactctagttctttcccacaaagcactctaaatataagagaatattatattctacctatgttttctccttttcatactaaaaaaatcctccagagcaaaaagatctagaatgaacacatacaattatattaactaagaatttatttagtgattactatatgcttaagattgtcttagtgctttagaaaactggggaaggagcccctctgatattagaataaacttatccctggcattcatatcctgacgttgagcagtattttaaaattatatattgatgtagtttggatgcttgacccctccaaatctcatgcagagatttgatccccagtgttggagtggggcctggtgggagatatttggatcacggggaggcatccctcatgaagggcgtggtgccttccttctggtagtgagtgactgcttcctttagttcttgcaagatctgattgtttaaaagaatctggcaccaccctcctctctctctcgcttcctcttgccatgtgatgcctgccctccttcaccttccgtcgtaaattgaggcactctgaagccctcaccagaagcagatgcttctggtacagtctacagaactgtgagctaaataaacctcttttctttataagttgccctgcctcaggtattcctttatagcaacagactaaggtattcctatatagcaaatggactaagacatgtatacataatatgtattactttatgtacttttatgtactatttgaaattatatgtttatatccatgtgaatatatcctgtatatatatgtgtatatatatgtgtgtgtgtgtatatatatatatatatatatatgtatatgtctaaaagaaaatgcatgtcaaattctaaatagctgacttactaatgaacttttcagaacacatcccatttgtaaggtggggataaggcaaaaattgtaaacattactaatatttatttgtcttactaacatactagttactttcatgagctttatgtgtttatctcatttaataggtacaatagaagagaagtgtcatcaacattgacagttcaaacgtaaagatcttctaaataggggtgaaaaagaaatcttaaagttatttatggctgctctcctgcatctctacaaggttaatagatgatgatttatgcaatttttttttagacggagtcttgctgtgttgtccaggctggagtgcagtggtgtgatcttggctcacttgcaaccctcacctcctgggtttaaacgattctcctgcctcagcctcccaggtagctgggattacagggacccgccagcacatcctgctaatctttttatttttaatagagatggggtttcaccatgttggccagaccagtctaaactcctgaccgcaagtgatccgcccacctcagcctcccagagtgctgggattacaggcatgagccacagtgcctggcctgatttgtggtatttttgagtagccgttgttaatgagactattcttacattgccagatgattttgatgactattttaattggatatttgttttgtatacattttctttataagggcagcagaaggtttggaagtttcaagtggttagagtagagttaatggagcagtaatagaaggtgtttctttcctctaggtactacagtaatgaagtaattttcatttttgcttttttcttttctttgagacaaggtctcgctgtgttgtccaggctggaatgcagcggcatgatcatggctttctgcaacctgtgcctcccaggctcaagcaatcctcccacctcagcttctgagtatctgagactacaggcaggcaccaccacgccctgctaatttttgtatatttcgtagagacggagttttgccatgttgcccaggctggtcatactcctgagctcaagcagttcatcaccttggcctcccaaagtgttgggattataggcataagccaccatgactggcttgaaataattttcttagataattgaataatatagtttctcaggtatagtgacaaatatttgtagaacactggcattgatcattattaactcaatattattaaaattactgaggtgataaaagctttttgtaaaacaaatcaaataatgtgtggaagtatatggagcaatgctatccagtagaaatacaatgtgagccacaagtatagtttaaaattttctggtagctatgttacacataatgaagagaaataggtggtattaaatagaaatatatttaggctgggcgcagtggctcatgcctgtaatcccagctctttgggaggctgatatgggaggattgtttgaggccaggagtttgagaacagcctggtcaacatagtgagaccccccatctctaatttaaaaataaaaataaaaattgtatttaacccagtatttccaaaaggctattatttttatatgctatatactcaatgtaaaatcattaaggaggtttttcttgtactaagcctttgtaattttacacctactgcacatctcaatttggactagtcacaattcaagtgctcagtagcagtgtgctgctcatggctattgtattcagcagcattgttctagagcagggatcaggaaactatgacctgtaggccaaatctggtccagcacctgtttttgtacagcccaggagttaagagtggtctttacattttttaatggttgaaaaaaattagatgattagtaatatttcatgatgtgtgaaaatcctatgaaattcaaatatcagtgttcataaataaagttttattgaacacacttgcactcctttgtctatgactgctttcttgctacggcagcatagttgagtaattgcaagagactgtatagcccacaagcctaaaatatttaattactggccctttacagaaaatgtgggtcaacctctgcaagagtaaaagagaaagttacttatgcatatatccaatcccacacctgtttctagaagcaatcactattagggtatttttttgtttttctagatctttctatatatgtctgtatatctgtgtgtacacacacccacatatatcctatggctagttttatttatgtatctataacatatttacactttttaatataatgttattacatatatattctgtgatttcctttctttaactatattttgtatcagtttccacatcagtacctatacatgtttcttgtcagtacaaatacatgttttcacagcagtgcacatcttcataattctttgtttttttgtgagatagtgtctcttgttctgttgcccaggtctactcactctgagtgcattgatgtgatctcaactcagcagcctccacctcctgggctcaagtgatcctcccaccttagcttcccaagtagctgggactacgcgggtgtgcaccaccatacctggctaatacagaaatttttgttgttgtagagacagtgtctccctatgttgcccagggtagtctcgaactcctggactcaagtgatcctcccacctcagcctcccaaagtgctgggattgcaagtgtgagccactgtgcccagctgatcttcaacattctttctaatgattatttatattccataatatggttttactgtaagttatttaaccagttccccattaaggagttgaggtttgttctttctttttctttctctcttcattcttttgttctttagttcttttcttcctttctattataaacagtgttgcagtgaacatacagatctttgtgtactggtacagaaatttcttcaggacagatttctagaactaaaattggatcagaaggtaagtttttttgtgtgtttatttagagacagggtcttgctctgttgcccaggttggaaggcagtggctcaatcatagctcactgtaaccttggacccttgggatccaggaatcttccccactcagcctccagagtagccaatactacaggtgcatgccaccatgctctgctaatatttttagtttttgtagagatgggggtcttgctttgttgaccaggctggtcttgaactcctgatctcaagccatcctcccacctcagcttcccaaagtgctggaattacaggtgtgagccactttgtccagccagtcagaggataaatttattacacattagggtagaggctgccaaagtgccttccaaaaagactattagtttacacattagtttacgttagcagtgttatgacttttctccctacatctctcactgacactagataataatttaaaacgtttttaaccagtctaaattcagttttactaagtactttaatatttctttaatactattctacttacaaaaaatactattgctcatttaaacaaccaaaaagaaaagaaaattaaccaagaaatatatcaactgtaaggggaaagtcccctgaaaataacacccagaaataccactattgtagaagtattccagctgaaaattttagcctacactcttaacatatttttactttcaaccttgttacttttccttgagaggatcatggtttagtaaaaagcaattatgctttagaattagatggacttcaggccgggcgtggtggctcatggctttgattccagcacttggggaggccgaggtgggcagatcaccgaaggtcaggagttcgagaccagcctggccaacatggtgaaagcccatctctactaaaaatgcaaaaattaaccggggtgtggtggcacttgcctgtagtcccagctacttgggaggctgaggcaggagaatcacttgaacctgggaggcagaggttgcactccagcctgggcgacagagtgagactctatctcaaaaaaaaaaaaaaaaaaaaaaagaattagatggacttcagttgaatcacattctaccaaactgtaaaatttggtggcaaattttacttaacctttctgaatctaagttttctcatctgtaaaaatgtgaagttagattaaataggtttaagtaatagatgaagtcacccattgtagcaattttagaaaatatttgctttattatttattttattcctttcttatttagtatgtcccaaaagtatatatttttttcttttcctttttagttaacacctcataattggacctatttatgagataaagtgatatttcaatacacgtgcaatgatcaaatacaatgtacaatgaccaaatcaggataattaacatatttgtcacttcaaaaattatcatttctttgtgttgagaacattcaaaatcttctacctttttcaatgtaccataaattattgttgatcgtattcatcctacattgctacagagcactaggacttattcctcctatctagctgtaattttgtatctgttaaccattatcttcctacccctgcctttctcagcctctaataacaacaattctactctctacttttatgagcacaactttttagctcctatatgagtgaggacctgtggtatttatctgtttttccaacttttcatttggattattagttgttttgctattgagttccttatatattctggatattagtcctgtttcatatgtatagtttgcaaatgttttctcccattctacagattgtctcctcactttgttgtttcctttgctgtgcagaagctttttagtttgaggtagtaccatttgcccatttctgttttttgttgcctgtgcttacccataaaatctttgcctagaccagtatcctgaggattttccctatgttttcttttagcagttttatacttttgggtcttacatttaagtttttaattcattttaggttgatttttgtatatggtaagagataaaagtccagttttattcctctgcatatggatatccagttttcccagcaccatttagtgaagagggtgtcctctcctcaatttatattcttgatgcctttgttgaaaatcagttgactgtaaacatatggatttatttctggtttctcttttatgtcccattggtctatatgtctgtttttataccaataccatgctgttttggttactatagctttgtaatgtattttaaagttaggtagtgtaatgcctctagctttgtactttttgctcaaaagtgatttggctacttgtcttttgtggtttcacacatattttaggattaaaaaatttctgtgaagaatatcattgatattttgatggagattgcgttgaatctgtagattgcttggggtagtatgatcattttaacaatattaatttttccagtctgtgggcatgggaggtctttccatgttttgtgtcctccttaaattcttccattagtattttgtagttttcatcttggacatctttcacctccttgattaaatttcttcccaagtattttttggtagcaattgtaaatgggattgctttcttgattttttttcagataattcattattggtgtgtagaaaatctactgatttttatatgttgatttggtatcttgcaactttactgaattcatttactagttctaagagtttttctgtggagtctttaggtttttgtatctataaggtcatgttctctgcaaagggccaatttgacttcctcttttccaatttggatgccctttatatctttctcttgcctaattgctttggctaggatgttcagtactgcattgaataagagtgatgaaagtgggtatccttgtattgttccagttcttacaggaagagttttcagcttttccatgttcagtctgatgttagctgtgggtttgtcatatatgatttttattgtgtaggtatgttccttctacacataatttgttgagagttttcttttatcatgaagggatgttaaaatttaccaaatattttttgtgcatctattgatcataaggttttgccctccactctattggtgagaggtatcacatttattgatttgcatatgttgagccatccttccatccctgagataaatcctacttgactgtggtgtactatctttttgatgtgcttttggatttggtttgctagtattttgctgaggacttttacaactatgttcattagggatattggcctgtagttttcttttttggttgtatccttgtctcactttggtatcagggtaatgctggcattatagaatgaattaggaagaattccctgctcttcattttttggaatagtttcagacaattggttttagttcttctttgcacatttggtagaattcaacagtaaagccatctggcggtgggtttgtctttgttagtctgtttaggctttctatttcttggtaggttatatgtatacatgaatttatctgtttcctctaggttttacagtttttggagtatagttgtttattaatagtctttaatgatctttctgtttctgtggtatcagttgtaatgtatctttttttttgcttctgattttctttatttgggttgtgtctctttttttcatggtctagctaatggtttatagattttcttttgtttcattgatcttttttgtcctccctccttttttttagacagggtcttgttctgtcatctgggctgcaatgcagtggcacaatcatggctcagtgtagacttgacctcctagactcaagtgatcctcccaccttagcctcctgagtagcttgggatcataggaccacagatatgtgccactatgcctggttaatttattcttattttgaaattttgtagagatgagttcttactatgttgcccaggctgctgcttgatctttattacgtttttgtttttattaattttgactttggttttcccttgcttttctaccttcttaaggtacatcattaggttgtttatttggaatatttctacttttttgatgtagatgtttattgctataaacttttctcttagcactgcttttgctgtatcccataggttttggtatgttgtgtttctgttttcatttgtttcaagaaattttttgatttccttcttagtttcttcacagactcattggccattcaagagaatattaatttctgtgtaaagtttctaaagttctccttgctattgatttctagttttattccattgtggtctgagaagatatttgatatgatttcagtttttgaaaatttgttgagacttgtttttttgtggcctaatatgtggtctatcctggaggatgttccatgtgctgataggaagaatgtgtattctgtggctggcaaaatggccaaataggaaaagctcccgtctgcagctcccagcaagaccaatgcagaaggcaggtgatttctgcatttccaatggaggtagctgctcatctcattgggactggttagacagtgggtgcagcccacagagggcgagccgaagcagggtggggtgtcacctcacctaggaagcacaaggggtcagggaactccctcccctagccaagggaagccgtgagggactgtgctatgagggacagtgccatccagcccagatactacacttttcccctggtgtcttcacaacccgcagaccagaagattccctcaggttcctacaccaccagggccctgggtttcaagcacaaaactgggcaccatttgggcagacaccaagctagctgcaggtttttttttttttttttcatttacagtggcacctggaatgctagtgagacagaaccatttactcccctggaaagggggctgaagctagtgagccaagtgatcttgctcagtggatcccacccccacagagcccagcaagctaagatccactggcttgaaattctcgctgccagcacagcagtctgaagtcgacctgggacactgaagcttggtggggggaagggtgtctgccactactgaggcttgagtaggtggttttcccttcacagtgtaaacaaagccatcaggaagtttgaactgggtggaacccaccacagcccagcaaagctgctgtagccagactgcctctctagattcctcctctctgggcagggcatctctgaaagaaaggcagcagccccagtcaggggcgtatagataaaacccccctctccctgggacagagcacctgggggaaggggtggctatgtgtgcagcttcagcagacttaaacgttcctgcctgctggctctgaagagagcagcagatctcccagcacagcactcaagctctgctaagggacagactgcctccttaagtgggtccctgatccccatgcctcctgactggaagacacctcccagcaggggtcgacagacacctcatacaggagagcttcggctggcatctggcgggcacccttctgggacgaagcttccagaggaaggagctgtcagcaatctttgctgttctgcagcctccgctggtgatacacaggcaaacagggtctggagtggacctccagcaaactccagcagacctgcagaagaggggcctgactgttagaaggaaaactaacaaacagaaagcagtaacatcaacaacaacaaaaaggatgcccacgaaaaaaccccatcggaaggtcaccagcatcaaagatcaaaggtagataaatccatgaagatgaggaaaaaccagtgcaaaaatgctgaagattccaaaaaccagaatgctgcttctcctccaaaggttcacaactccttgccagcaagggaacaaaactggacagagaataagtttgacaaattgacagaagtaggcatcagaagatgggtaataaactcctctgagctaaaggagcatgttctaacccaatgcaaggaagctaagaaccttgataaaaggttacaggaactgctaactataatagccagtttagagaagaacataaatgacctgatggagctgaaaaacacagcaagagaacttcatgaagtatacgcaagtatcaatagccaaattgatcaagtggaagaaaggatatcagagattgaagatcaacttaatgaaatcaagtgtgaagacaagattagagaaaaaagaatgaagaggaatgaacaaagcctccaagaaatatgggactatgtgaaaagaccaaacctacgttggattggtgtacctgaaagtgacagggagaatggaaccaagttggaaaacacacttccggatattacccaggagaacttccctaacctagcaagacaggccaacattcaaattcaggaaatacagagaacaccacaaagatactcctcaagaagagcaaccccaagatacataatcatcagattcaccaaggttgaaatgaaggaaaagatggtaagggcagccagagagaaaggtcaggttacacacaaagggaaacccatcaggctaacagaaaccctacaagccagaagagagtgaggaccagtattcaacattcttaaagaaaagaattttctacccgcaatttcatatccagccaaactaagctttgtaagcaaaggaggaataaaatcctttacagacaagcaaatgctgagggattttgtcaccaccagacctgccttacaagaactcctgaaggaagcactaaatgtggaaaggaaaaactggtaccagccactgcaaaggcataccaaaatgtaaagaccatcgacactttgaagaaactgcatcaatgaatgtgcaaaataaccagctagcatcataatgacaggatcaaattcacaaacaacaatattaaccttaaatgtaaatggactaaatgccccagttaaaagacacagactggcaaattggatagagtcaagacccattggtgtgctgtattcaggagatccatctcacatgcaaagacacacataggctcaaaataaagggatggaggaatatttaccaaacaaatggaaagcaaaaaaaaaaaaaaaaaaaaaaaagcagggttgcaatcctagtctctgataaaacaggctttaaaccaacaaagatcaaaaaagacaaagaagggcattacataatggtaaaaggaccaaaaggaccaatgcaacaagaagagctgactatcctaaaaatatttacacccaatacaggagcacccagattcataaagcaagttcttagagacctgcaaagagacttaaactcccacacaatagtagtgggagactttacacccaactgtcaatattagacagatcaatgagacagaaaattaacaaggttattcaggacttgaactcagctgtggaccaagtggacctaacagacatctacagaactctccacaccgaatcaacagaatatacattcttctcagcaccacatagcacttattctaaaattgaccacataattggaagtaaaacactccacagcatatgcaaaagaacagaaatcataacaaacagtctctcagaccacactgcaatcaaatcagaactcaggattaagaaactcactcaataccacacagctacatggaaactgaacaacctgctcctgaataactactgggtaaataacaaaattaaggcagaaataaataagttctttgaaaccaatgagaacaaagacacaatgtaccagaatctctgggacacagctaaagcagtgtttagggggaaatttatagcactaaatgcccacaggagaaagtggggaagatctaaaattgacaccctaacatcacaattaaaagaactagagaagcaagaggaaacaaattcaaaagctagtagacgacaagaaataactaagttcagagcagaactgaaggaaataaagacacaaaaaacccttagaaaaatcaatccaggagctggttttttgaaaagattcacaaaatagactgctagccagactaataaagaagaaaagaaagaagaatcaaatagacacaataagaaatgataaagggatatcaccactgatcccacagaaatacaaactaccatcggagaatactataaacacctctacacaaataaattagaaaatctagaagaaataagttcctggacataaataccctcccaagactaaaccaggaaaaagtcaaatccctgaatagaccaataacaagttctgaaattgaggcagtaattaatagcataccaacccaaaaaagcccagggctagagaggttaacagccgaattctaccagaggtacaaggagaagctggtaccattccttctgaaactattccaaacaatagaaaaacaaaaggactcctccctaactcattttatgaggccagcattatcctgataccaaaacctggcagagacacaacaaaaagagaaaatttcaggccaatatcccatgatgaacactgatgcaaaaatcctcaataaaatactggcaaaccaaatccagcagcacatcaaaaagcttatccaccacgatcaagtcagcttcatccctgggatgcaaggctggttcaacatatgcaaatcaataaacgtaatccatcacataaacaaaaccaatgacaaaaaccacatgattatctcaatagatgcagaaaagccctttgataaaattcaacaccccttcatgctaaaaatactcagtaaactaggtattgatgggacgtatctcaaaataataagagctatttatgacaaacccacagccaatattgtactgaatgggaaaaacttggatacattccctttgaaaacccacacaagacaaggatgccctttctcaccactcctattcaacatagtattggaagttccggccaaggcagtcaggcaagagaaagaaataaagggtattcagataggaaaagaggaagtcaaattgtctctgtttgcagatgacatgactgtatatttagaaaaccccatcatctcagccccaaaactcctaaagctgataagcaacttcagcaaagtcacaggatacaaaatcaatgtgcaaaaatcacaagcattcttatacagcagtaatagccaaatcatgagtgaactcccattcacaattgctacaaagagaataaaatacctaggaatgcaacttacaagggatgtgaaggacctcttcaaggagaactacaaaccactgctcaaggaaataagagaggacacaaacaaatggaaaaacattccatgctcatggataggaagaatcaatatcgtgaaaatgaccatactacccaaagtaatttttagatttaatgctattgccattaagctgcaattggctttctttgcagaattagaaaaaactactttaaatttcatatggaaccagaaaagaacccatatagccaaggcaatcctaagcaaaaagaacaaagctggaggcatcatgatacctgacttcaaactctactacaaggatacagtaaccaaagcagcatggtactggtaccaaaacagatatatagaccaatggaacagaacagaggccttagaaataacaccacacatctaccaacccaaatgtccatcaatgatagactggattaagaaaatgtggcacatacacaccatggaatactgtgcagccataaaaaaggatgagttcatgtcctttgtagggacatggatgaagctggaaaccatcattctgagcaaactatcgcaaggacagaaaaccaaacaccacatgttctcactcataggtgggaattgaacaatgagaacacttggacacaggacggggaacatcacacaccaggacctgtcgtggggtgggagggtgggggagggatagcaattaggagaaatacctaatgtaaatgacgagctaatgggtgcagcaaaccaacatggcacatgtatacatatgtaacaaacctgcacgttgtgcacatgtaccctagaacttaaagtataataataaaaaatgaaataaaataaaaagatgaaaaagttctggagatggatggtggtgatggttacccagcaatgtgaatgtagttaatgccatagaactgtatacttaaaatgattaaatgtcaattttatgttatgtatattttaccacaataaaaaaaaattggatgggaacaaaaaagaaaatgtggcacatatacaccgtggaatactatgcagccataaaaaagaatgagttcatgtcctttgcagggacatggatgaagctggaaaccatcattctcaacaaactaacacaggaacagaaaacaaaacactgcatattctcactcataagtgggaattgaacaatgagaacacatggacacagggaggggaacatcacacaccagggactgttggagggtggcagtaagagaagggatatgattcagagaaatatctaatgtagatgacgagttgatgggtgcagaaaactaccatggcacatgtatacctatgtaacaaaactgcatgttctgcacatgtatcccagcacttaaagtataataaaaaaattacaaaaaaaaagaagaatatatattctgcagctactagatgaaatttttggtaaatgcctgttaggtccattgactccatagggtagtttaagtccagtgtttctttgttgattttctgtctagattatttgtccagtgcttagagtgggacactgaagtcccctaacttcattgtttttgggcctctcactttaactcaataatatttgctttatatatctgggtgctctggtattgggtgcatacatattaaaattgttatatcctcttgctgaattcatctctttatcattatataattatcttgtctctttttatgtttgacttagaatctattttgtcttatataaataaagctattcctgcatgcttttggcttctatttgcatggaatatctttttttatttctttcactttgtctttctgcatttttacaggtcaagtgagttacttgtaggcagcatatagttgggtcttattttttattctttcagtcagtctgtatcttttaattgtgggatttaaatggttgttattgatagatgaggacttactctcgtaattttggatatcctttgttcctttcttcttctctgattgctatttattattattactgttttggagacagggccttgctctattgcccaggctggagtgcggtgacacagtcatggctcattgcagcctcaacctcctgggctcaaacaatcctcctaccacagcctcctgagtagctaggaccatagacacatgccaccacacccagctaatttgtgtgtgtgtgtgtgtgtgcgtgtgtatgtgtatgtgtgtgtatgtatgtgtggaaatgaggtctcactatgttacccaggctgatctccaactcctgggctcaagtgattctcctgcactggcctcccaaagtgctgagtttacaggcatgagccatcttattgtttacctttgcagtttatctttgcagtttggtggctttctgtagtgataacatttgattcctttctctttctcatttgtgtatctgtactaccagtgactgttatacttttgtgtgttttcatgacagtagatatcttcctttcacttctagatgtaagacccacttaattatttcttgtagggccagtatagtgatgatgaattccctcagtttttgcttgtctggaaaatactttatttttccttcatttatgaaggatatctttgctgggtgtagtattcttgactagcaggtttttttctttcagcacattgaatagattatctcattctctcctggcctgtgagatttctgctgagaaatctgctgttggtctgttggagattcccttatatgtgacttggtgcttttctcttactgtttttagaattctctttctttatcttgactttcattttttactttttagagacagggtctcattctgtctcacagactagagtgcagtggcataatcatagctcactgcagctttgaacgcctgggctcaagggaccatcccacctcagcctcttgagtagtgaggactataggcacatgccaacacaccctggttaattttcttccctccctccctccctcccttccttcctcgacaaagtctctcactctgttgctcaggctggagtgcagtggcatgatgtcagtgcactgcaacctctgccttctgggttcaagcaattctcgttcctcaacctcccaagtagctgggattacaggcatgcaccaccactctcagctacttttttgtatttttttagtagagacggggtttcactatgtttggcaggctggtttcaaacctggcctcaagtaatcccttggcctcccaaagtgcctggattagaggcattagccaccacatctggcctaatttttatttttattttttgtagagacaggatgtcactatgttgtctaggctatccttgaactcctggcctcaagtgatcctcctgcctcagtctcccaaagcactgggatcacagacatgagtcactacacctgaaccccaacttagacttttgacagttttaattataatgtgcttcaaagaggatttttgggggctgaccctatttggagatattttagttttttgtatctggatgtctatatcgcttctaatatttgggaagtttttaggtattcttttattaaataggttttcttttctctttccttttctttcctccccctccccattcctttccccttccccctccccctccccctctctcccctccccttccctcacctccccttcccttcccctctcctccccttcccctactctttcttcctttcctctccccttccttccgctcttctcctctccctttcccttcttttcctttccctttctcttttcttctctttctccctctctgttgctgaagtacagtgtgtgtttacaactcactaaagccttgagctcccaggctcaaccttcggagtagctgggactacagatgtaggcccccatgcctggctaatttttaaaatatttttaatggagtaggggtatattagtccattctcacactggtataaaaacatacctgagaccggataatttatgaagaaaagaggtttaattgactcacagttccacaggttgtacagacggcatgattgaggaggcctcagaaaacttacaatcatggcagaaggtgaaggggagacaggcacagtctttacatggcagagcaggagagacagagaatgaagggggaagtgctacacacttttaaataaaccagatctatgagaactcactcactatcatgagaacagcaagggggaaattcatccccatgatccagtcacctcccaccaggccccacctccaatgcttgactccacttccaaagcaattcaacatgagatttgggtggggacacggagccaaaccctatcattctgcccctggcccctcccaaacctctcatttccccctggctcctcccaaacctcaaatgtccttctcacatttcaaaacacaattgtgcctttccaacggtcccccaaagtctcagctcattttagcattaactcaaaagtccaagtccaaagtcttacctgagacaaagcaagtcccatctgcctatgagcctataaaataaaaaacaaattagttagttccaagatacagtgggggtacaggtattgggtaaattcttccattccaaaagggagaaattggccaaaacgaaggggttacaggccccatccaagtctgaaacccagcagagtagtcattaaatcctaaagctccaaaataatctcctttgactccatgtctcacatctagggcacactgatgcaagggttaggttcctaaggctttaggcagctctgcccctattgctctgcagggtacagcccccacagctgctttcacaggctggtgctgagtacatgtggcttttccatgcacatggtgcaagctgtcagtggatctgccattctgggctttggaagatggtgaacctcttctcacagctccactagggagtgtcccagtggggactctgtgtggaggctccaaccccacatttcccctctgcattcctctagtagaggttctccttgaggggtccacctctgcagctgatttctgcctggacatccaggcatttccatacatcctctgaaatctgggcagagtctcctatacctcagctcttgtcttctgctcagctgcaggcccaacaccacttggaagccaccaaggcttgggttgtgcaccctctgaaggcatggcccgagctgtactgtggtcccttttagccacggctggagctacagtggctgggacacagggtgccatgtcttaaggctgtacagagcagcagggccctgggcctggcccacagaactatttttcccttctagacctccaggcctgtgatgggaggggctgctgtgaaggtctttgaaatgccctggaggcatttttcccattgccttggctcttctttatttaggcaaatttctgcagccttgaattcctccccagaaaatggttttttcttttctactgcatggtcagactgcaaattttccaaacttctatgctgtgcttcctttttaaatataacttctagtttcaggttatttctttgtttatgcaaatgagtgcaggcttttagaagcagccaggccacatcttgaatgctttgttgcttagaaatttcttctgccagataccctaaataatctctctcaagttcaaagttccacagatctctagagcaggggcacaatgccaccagtctgtttgctaaagcatagcaagagtgacctttactccagttcccaataagttcctcatctccatctgagaccacctcagcctggacttcactgtccatatcactatcggcctattggtcacagccattcaacaagtctctaggaagttccagaccttcctccatcttcctttcttcttctgatcccaccaaactgttccaatctctgctcataatccagttccaaagtcgcttccacattttcaagtatctttatagcaatgcccctacttctctggtaccaactttctgtattaattcattctcacactgctataaagacatatctgaggctgggtaatttatggagaagaaaggtttaattgactcacagttccacaggctgtagaggaggcatggctggggaggcctcaggaaacttacaatcttgttgcaaggtgaaggggaagcaggcataatcttcacatggtggagcagaagagagagagagtgaagggggaagtgctacacacttttaagcaaccagatcttgtgagaactcactatcataagaacagcaagggggaaatccatcccccatgatccaatcacatcccaccaggctccatctccaacacttgggatcacaattcaacatgagatttgggtgtggacacagagccaaaccatatcatgtggtctccttatgtcgctcaggcttgtcttgaactcctgggctcatgcgatcctcctgcctcagcctcccaaattgctgagattacaggtgtgagccactgcacctggcctctttcattaaataggttttctatgctctttcctgtctctttctggattatttgtttacttaatggtgtcccatgtgttacataggcttttttcatccttgagagcttgtttggaggttctagtaggggagcacagctacttgtatacccttggctaaagaatggtcctcctctgttggggaacttcatcctcttcaaccaagcacgaaggggggacacacatggagttgtgagggaggaagaggacacctgcttagccagacagattagccaaatcagccctggcgattagtggggtgacagatgtcactgccagatcaccctcacgtcctcctcattctcttctgttttgtttttggttgtttttctttcttctgtttgatctagtctgttgttgaagctctcaattgtatttttatttcattcattgaatttttcagttctaagatttgtttgtttttttgtttaatgatttctatctctgctgaatttctcgcttagatcatgaatcatcttcctgctttccttgtagtgtctgtgttctcttctatcttcctgagtttccttaagattattattttgatttctttttttgagatagagtctcgctctattgcccaggctggagtacagtggcatgatcttggctcactgtaacctctgccatctgggttcaagtgattgtcctgcctcagcctcccgagtagctgggattacaggagcctgccactatgcccagctaatttttgtatttttagtacagacggggtttcaccatcttggccaggcattattttgaatttttaaaaggtatttcatatatttccttttctttggggtctgttttggaaaattattgtgttcctttggtaatgtcgtgttttgctttatcatgtttcttttgtccctgtgttgatgtacgtgcagtcacttcttccaattttatggagtagctttcacagggaaagacctttttctgtagatgtagctatagtgttggttggatatgatactctggctttggttctggttgagtgcagtagtgtagtctccatatgatttcttcagctgtaatcaacgtcagcaatatccacaagtttctcagtggcttaggctgtgattgtttgtggaagctgtgattgtttgtttgctgaggacaaggacattaaataggctgggttttgggcccctgaggggcacatgtgggtgggcagcatcccctctgctagagggggcagatttgctgatgtggagtcagtggatcccaggaaggctggtcccaggtggcaggccccaggtgggccagttcttgggcccctgtggattgcacacagacatgaggcagcctcaccgctgggatgggtggggtcaccagtgctggtagcagtgggctccagggttggctactagtatgtcaaaggagatagctgagaagtaacattagtttatcagtggatctggacctgtagaaagatttattcctttgaggatcatctttgctttctggaaaacttctttagtatctgggcctgcttcatgctcattctatgattcctatattgattccgcttcctatttttgctccttataatgactgatttcaaaactgagcccttcatatcctgattagcaatagatctcaagcttttgattggtaaatttcagactggttgctgctactatccttccctctctctactttttctgaatgtccagcagggagaggatgagtgcgattggctttgccacttctcttcgacattctggagactttaccatcatagcaatctcatgggttaagggaagtgaatagccaatattttacagagggatttcattccccggctttatatgcagaaaattcagtattcttatggttctagtaatctctgtctgtggatacctatttcctagtcatcctccttccaggttacatcttgtgatctagtcaggctgttcttctctttaccccatagatatgccaccacactctgcctctctgcctttttcatgtcctcttcccaacaatccacatactatccatatatcaaggttcagtttaaatttttctctcttccataaagactctcccagctaggccagcccttctgctctccctctccactgatgtgctactccaacttaagagttcctattaaatgatttcatttatcttttttgttgttgtttcatcattgttggaagacattatgtggaaagacctggatcctgatgccagctctagtactagcttggaatatatgattgggcatgagacttgacagtttccacacatgtagaatgaagggtatgggcttgttactggaaaacattacagatttgattttatagaaattcaaaatttctgtgaaggaaaatatgtcataagcaagattaaaagatatatgactggggaaaatgtgtgcaacatatatacgaaggattaatatttctactataaaagtgacttcaaaaactggatgtaatggcacatgcctatagtcacagctagtcaggaggctgaggtgaggggactgctttagccacggggttcaagaccagcctgggcaacatagtgagacctccatctcttaacatttttaaaaaagtgtcttcaagccaatagagaatggacaatttacaaaaaataataataacacaaatggctaataaccacctgaaaagatgcttgttccctagtggaattaggtactggcacataaaatagccatgagaagccattctttttctccagaaagatgtacattatattcagagttggagaatataggatcacaaggtcacaaggttgttaagagcctaaagtgatatagcttttttggtctaaaaatattaaatatacttccctttgatatatcaaatccatttctaggaaagtatcctgaaaaaatacttggacaaagatatacataaaaactgtccagatagtagttaatttgtagtagtaggtaatttgtagtattatcaataatttgaattttcatcaataggaaaaagctatatagtcactgaaaacagtgagggcaggctggattcaggtgcatccacagccataaaaatatctctgatattttgttgacaaaaaaaggtaagttgtaaaattatgcaatgtgatcccattttggaggaggagggaagaaagcattgtatatcttaaatatatacttttatagttttatcatcttagaaaattatttggaaggaattacaccaaacagttacaaggagctacccctagggaataggaatagatgggattaaagggaggcattttcactttttaaacgtggctgtgattggtaaattatctattttttacatgttaacctccttttcccagttaattaactctttggctatagataatgttatctcttcctcatagcacttaccacggtgttgatcatttaactatttgactctaatctcttcttgttttcatggtttctgataaacagttcactataatttttgtacttgttcctctatagtgaggtgtctcccctccccactgtttcttttaagattttctctgtctttggttttctgcagtttgaatatgatatgcctaggtgtcatttttaaatatttatcctgctggtgttctctgagcttaccgaatctttattttggtgtccatcattaattttttttttttgagacaaagtctcattctattgcccaggctggagtgcagtggcatgatctcagttcactgcaaccactgcctcctgggttaaagcgattctcctgcctcagcctcctgagtagctgggattacaggtgcccaccaccatgcccggctaatttttgtatttttctagagacagggtttcaccatgttgtccaggctggtctcgaactcctgacctcaggtgatctgcctgcttcagctttccatagtgctgggattacaggcatgagccactgtgcctggcctatcattaattttgaaatggtcattattaccttctgcttggttctctcccgctaacgttcccttggtgtatattatgccttttgaatttgtcccacagttcttggatgctctgtgttttttttttttgtttgttttttcattattttttctccttgtatttcagtttgggaagtttctattaatatctcttcaaacccactgagtggttttgatttatagcattttcttttgattctttcttagtttccatctttctgctttcaatacccatatgttttgtatgttgtctgttgtttcccattaaagcccttaatgtaatcataattatttaaaattccctgtctgatagtccccaaatctgtgccatatctaaatcttgttcttatatttgctttgcctcttcagactagactttttcttgccttttttttttttttttttttttttttgagacagaggttcactcttgttgtccaggctggagtacgatggcacaatttcggctcactgcatctacctccacctcccgggttcaagtgactctcctgcctcagcctcctgagtagctgagattacagatgcctgccaccatgcccggctaattttttgtattttttagtagagacagggtttcaccatattggagaggctggtctcaaactcctgacctcaggtgatccacccatcttggcctcccaaagtgcccagattataggcgtgagccaccgcacccagccttttcttgtctttaacatgctttgtaattttcttgtcgaaagacaaatactatgtatctagtaataggaactgaggtaaataggccttgaagggaggtttttatgttaatctagctagcagttgggctgtatttcatgttttctatagctgtaggtgccagaggcttcagatttctgtagtgtgcttgcctgttgttttggatcttctttcttaaatgtagtctgaatcgtacagctctttcagttataatccactggacagccatcatactggtgccctgttggtctagtggtaacatgtaggggagttctgtaatcttaggacaatatagaaatcttaaatttatggttaagattaaaagttctctaattttatgattttatgattatagaattaaatgatcttgcttataagtcatgtttatgaatatggaattctcattctaatgatgaaatctcagtcttttcatgggtctgtgttcctggctgtgatcttcataagtgtttcttgcctcctgcaccctttggcgagtcgggaagtctagctgggattggagttggagaattgttcttcccccagatggggcaagtctctggtaaagtgcttctcccttgagagcaggcatttgtaggggaatgctctgggtgtatttcacaaaggtcacttttccattcccctgacagagccttagaggggctctttcctgactttttactgcaagaacctggtggggttcctggaggtaaaacccatgaaagtatgtcacgcccccgccacactcccttggcaaggctgcattctccaagagtttctcactgtcacactagtccacctttaacctccagcaattcatcactcaccaattaagtgttcctttcagattaagactctagcacttctgttccacatcagcaggtgatggctgtaactctctggattcatctgtctctccagattgcaaggtgtcttttaaatttcccaaaggagaaaaaggctacttctcgtccaaatttttgtctaaatatagtttaaatccacttacccatttataatggtgatggcctttgaggaagctgatgtggtgtcctgagctgcatttcaggtttgcaggtgaggttaggcttggagcttctccacagcagattatacacatgcgaccagcctagcccatagctatgctcccaacaagacctcagagacctcagccaccaagcatacatttctgcgtagcagggctggagggacattgctcacaggtgtgcctatcaggcaaggagagagaatacgcctgtacacagcttcccaagaagccaactttctccttctgcaggaggtttcgtgcagggaagagataggcctaaggtgtcctagaatttatctacattgctgggaaactgctgtgtgtagcaagctttttgaaaatagagagcttgggcatggtatggcaactttgtattgctttttgcactagaagctttattgttaatgatgaaagagggaaaaaccttgattggttgttttacatcttactgttttattttgaagaaatatttatgttcccaaaggttaaaaaaaaaaacaccaactcttttttttttttttttttttttttttgagatggagttttgctcttattggccaggctggagtgcagtggcacgatcttgtctcactgcaacctctgccccctgggttcaagcgattctcctgcctcagcctcctgagtagctgggattacaggtgcccatcaccacactggctaatttttgtatttttagtagagacgggtttcaccatgttggccaggctggtcttgaactcctgacctcaagtgagccgcctgcctcagcctcccaaagtgctgggattacaggcgtgagccactgcacccggccaccaactcttttaaaagttgttttcaagggctaagaaatagcattttgaggtaataatatttctgaattttatgtaattcatattttctaaattgtgtataattcagtgttttccttattctaatcaatccaagatacatttgtgaatatatttctatgttccagatactacttatattaacttcagtatattaattgaagaactgagccctgaaacttaagttttgcccaggtcacatttgatggctagtggcagagttgattggttttatataaattgatccctttttttaacagttacaattttgaaatattttattttattttatttatttttgagatggagtctcactctgttgcctaggctgtagtgcagtggcattatctcggcttgctgcaacttctgcctcctaggttcaagcaattctcctgcctcccaagtagctgggattacaggcgtgtgccaccacacccatctaatttttgtatttttagtagagatggagtttcaccatgttggccaggctggtcttgagctcctaacctcaagtgatccacctaccttggcctcccaaagtgttgggattacaggtgtgagccactgtacctggccattgaaaaattttaaattaatgtataatttgtatacattaaaattcacctttgaaaaatattcagttcaataaatgttgaactgcgtagggtcatgtaaccaccaccatagtcaaaataaagaatattttcattaacccctcaaattcactctttttctaagtgttttaaagttttagattttattcttaggtctgtgacccattttgagtcgatttttgtgaaaagtgtgaagaagtgttgacctagtttcttttttctctccttccttcttttgcaaatgaatgtccaattatttgggcgccatttgttgaactgcctttttgtctttgctgaaaatcaattgacatatgtgtacaccaaaaatttctgaactctctcttttatttcattgatgggtatatctataaacctcacaagttttaaattgattagtgtggttaagacctcacacttactgtcatcactatttcaccacttacttgagctgtgacatgccaaaaaagtacaaagcaaagctatttctccctatatttttgacttttttaaatgcctcagacaactgtaactcattgacatttatatctcagagctaaaatacagagattacatttggatcaacaccttcagtacttatatcctgaaactaattatgttgccagtataatgaaatgaaaatgttaacatgtttaagcctgtcatgtgaaaatatttcagatgtcacaatgaaaccatttatgccatccttgtcatgggttgtctctggtcctataattactttctggcttccagaaaatccgtttgaatatttaaaatattcaagaataaaacattactgagaaagcagagatggttctttctctgacctcctagtaaaagtgtctttgtttttgtctaacttcatcttgcctgccctgagtttgaattgcgcatcaagattgggggtaccctgactttttccttgcctacatccaaagcaagacttccttggttcctttgacaagagctgtagtccaccagatgatttaaatctaagatactctttctttccaagtccatacttagttgtaggtagattttgtctctattggcagtggtggtgtcgggagtagagatagagcaccaaccactaaaaactgtgctcctccctttatctccaggatctggaattctgaattagtcactcctgggcatagccatggctgttgggggagaggaatgagaggggaagtttttcaccttgatccatcctgagaaccctgatctcatctgttctattcaccagtagctgtcattctcaaagtaccattcggcggctttcttcggctttggaaactttcatctctgccctggcactcttcacagactgaagctccttcccactttgtaccatgcacatggctcagcaccagattccaaaaagctggagctgggcttacagataggaacatttctgcaccttctgagggttgcaccaggttgtcttcactacactgtggtgttacctgtttgctaaagccctgggcctgtcttctgattgactgcttgtggagtgtgactctgaagttactctgtcccaacactcttggatgactcacaaaaggcaagttattgctcttttcttgatgtcatttccctctctccctgataaagtgagtagtcctccttatcacccctttgccgatgtcagagcacaactcattatgccaggcttgggggtttacagagttcctcagcactttgcaacactcctcctccccactctaccccagtgttataacagaccttcttagctcccttttcttgagggcattacagccaggaataactagctgagtggcgctaaatgaaatgtattctaagcctcccattaagccacccaccctcattgtgcttatggtaccttatttatagggactcctgtaattggataacatctctccccttagttctcttcctttcccttcaagcagaagccagctggggtcagaggagaggctgctttcacctgcagtctccatcactccgtctggctttccagatctcagtcttatagggggacacctgtgcaaatgattccagggcatttagtcatgcctgcccttgccctgtttcccaagacacaactgccggaggcagccatttaaaaatgtggtatgtagtcttttagactccttcatacatttcccttttttacatacatggggtgatactacatactgtagtcttctctgtttatgtactcctatattgatggcatttttcatgttctcagctgcatgaaattccatcgtataattctagcatggtttacttcaccaggtccttattgactgttgttcctgttgctacaattttcagatgttgtgaacaacggtcccatggacgtcagtgtatatacagctttgtacacctgaacaatgattttcttagacgtggaattgatagaactttcattttgatacactctaccctttagaaaagtagcaccatttggctgggtgcggtggctcacacctgtaatcccagcactttgggaggctgaggcgggcggatcatgaggtcaggagattgagaccatcctgtctaatacggtgaaaccccgtctctactaaaaaaaatacaaaaaataagctgggcatggtggcgggcgcctgtagtcccagctactcaggaggctgaggcaggagaatggcgtgaacccgggacgcggagcttggagtgagccgagatggcaccactgcactccagcctgggcaacagagcgagacttcatctcaaaagaaaagaaaagtagcaccatttatgctctcaccagctgtatataagggtcaccttttcccccacacacttgctagcaatgaactttagccttctttttcatctaaaaccatacccataccagtggaaacatggtattttattgtttcagtttgcatttctgtaatcattcatgggactgagcatcatttaatatacttaatagtcatttggattttttctgtgaattgtctgttcgtatcttttttctactgtggtgttcatcttttctgtgttgctttgtaagagttctttatacggtaaaaatattaactctttgttttgtgtatacattacagatatttcccccagtttggtgtttgttttttaattttgattcaatgtcttttaatacatggaccttaaaatttttatgcaactaaatctgttggagtttcctttgtggcttttggttttttattcttttcctgatcaaatattataaaaatatttaaatgtctttattgttccaatgatttttaaaaatcttttacatgtggaagatctgtcttgttatgaggatgataatggtagaatgacttcccatgtgaatggtagaagggtaatctgaagtcaccttttggcaggtctggaatcttatgaacatcgcagaaactaggtagaacctagagcccagtttgatgacattggtgtgtctacacagaggtttacacaatttcctcaagtgtatcattagtaaatgagaggtagaacctgtgattctcttgttattgttattaagttgagcaaaccttttatttccagccttagtcaaatctataccaactttatcatctgtaagccactaacaagtcaggctagatttttctgtataaagggaaagagtcctggctaagcaatatgttaattactattgtagccactctgagaaacacaatggacaccctttcaaaatttgtttcagatgttgagactgatgatgacacacacacacacacacgcacacacacaccaagagtgtgaaaaggttaattatgtacataattgtggtctccggagagagcagagcaggcatcccaagtgagtctcaaatggcttgagagggcaggaaacgagaagcctggctagggcttttattggggttgtggctggggctggagagaggattcctttatgcaggcagtggtttgcatggttggaatcttcccccagtgccaaaggagggagcccccagactttcttatcagcttacccagttatggggcagagtggcagagggagggtgaggctcaaaagcagatagcagtcaaatgtctaaaaccagagttagactccttataatctccagtcactgagcagttacattgacatatccttaggctccttcaagtgctgaagggtgggagcactggtatatcagagagttcgctccccaaagtgctagtttacgtccatgtttatgtagttgctaatggcaagagacaaccaaccaaccattattaaaaataaaaacatttgtgtcaggaacttcaaatgatcatgatgtgggtgttgaccgcatctacactgaggcagctggatggccctgacttttatgttgagacagattttaaatgactcaaccatgtggacatacaaccaccttatactcctctaacaataatgcctgtcctctgagttttttcgttacttggtgatttagttactaatgtcctatgaatcatatgtcagcaatgcatttatttctagcctactgagtgtcaaagctcgggtaaactgtggctattttcctttgtgaaaattccattcgttgacatgtgattttctcatttcctcctgaaaccattccatcattgtcagtaatcttattctctctctttaggcagtagttactgctcttgactgcttgcttttcagattttctgtctttcttggtaaccactttgatcactacaaactaacgtagtatagaatttatttcttggatatgcctgcttttgttgagtgtgtaaatggccatttcagtttagtgggttctttgacttagattaactacatatatctttgtgaccatttttagtttgagataagttggactccatgttcaatactaattttcaaggcctgaatgattgggttggcaaaactgaagaatcaaatattactcatttttcaccacttaatgctatgctatgtgattaatttttgcattctgtaaagcttgtcctataccaggctcttgtgtcataaattccatttgtagttatttgtttttaaaagattagtattctattcttttgtttctatactactgtgcctttttaaatcctttgatacatgtttcctacataggtttttgttatgtgttagatagtttgctttcattttcaaggcattattcaagtgtctttcactgcagaaatcctttttattccatttctctgcttgtcagaattccaaaccagaaatttctgagagagcaacaggaatttcacacttagttcaagttcatgaggttgagagatttctttgctagacatatttggcagaaataaaaattgttaatatagaaacctctcaaaaattaaaaatgggaaagtaacaatcattgatcccgcttttctggaaaatgttggacaaaattttacttaaaacaggggcaataattttcaagtcatgagtgatattggcttcttgtaattaaaactaaaaattcagtagtaaaatgcaaataaatcataatgtcagcatttacatggattagatttgtttattaagtcaaatggaattatatcagtaagctctgaactcagaaaaatttaagcaattactgtacaatcctgacagaacctatactataacatgaccaatgtaatcattataatctgtcaaaatcacatttagtgtacctacatgttgattattgaaagagaactatatcttgttccttatgaaaataaacacaatactaatatgatgatgaaataatgctataaaagtaaaatcatgatgttcagacataatttccccaaaacaggtatctaaaatgttaaactttaatcatcctgttggcacagttggcagcatgtcagtcttataaaatgttaaactttaatacaatctgatgatcctccgatgttactatttaatgttgtagtttatgcttatgttcataagaaaatatggcaatgtcaaatattgttctcatttaccattagaatgtttctgtcatccttcaagaggtctgaatagatcatggaaccatgttcaagggctgctgtattagtaagtagttacttatttctctgggtcagtgaatcagattttagcatgtgattgcatggcatcttaaagcatttggaaaggctggaattaggagtggcatgatgttttcatctttctaatacgtagaatctgtactaaagatataaagatataatagctaattttgtgtatcaacttgaccaagccatggtgcccagttgtttagtctaataccagtctaggtgttgctgtgaaggtactgtttaaactgattaacacttaaatcagtaggctttgagctagcatattactctccataatgtacgtgggccttgtccaatcagttacagacattatgagaaaagagcgaggtccccagaggaaggagttctgtctccagcctggtctgcagatttgagactttccagctccacaatcacatgagtcaattcatatatatatatatatccttttggttctgtttctctggagaaccctgactaactggtaattaaaaaattaatacaaatgctccttgacttatgatggggttatgtcccaataaactcaccattagttgaaaatatcataagtgtaaaatgcatttaataccctgataaacccatcagaatagttttgaaaaatgtaagttggccaggtgaggtggctcacacctgtaatcccagcactttgggtggctgaggcgggtggatcacctgaggtcaggagttccaaaccagtctgggcaacatggcaaaaccctttctctactaaaaatacaaaaattagccaggtgtggtggcacacatgtgtaatcccagctacttgggaggctgagacaggagaggatcgcttgaacctgggaggccgaggctgcagtgagctgagattgtgccactgcactccagtctgggcaacagagcaagactccatctcaaaaaaaaaaaaaaaagaaaaaaagaaaaaagtaaatcaaaccatcacaagccaagatgctatattctaaaatataaaacaccccaacctcattatgtgacattatcttctcaatagttttcctctaaactctgctcagcctgcctgcctttcttttcttttctttttctttctttctttctttctttttctttttttttgtgagacaggttctcactttattgccctttattggagtgaagtggtgcagtcatagctccctacagtctcagactcctgggttcaagcactcctcctgtctcagcctcctgaatagctgggaatacaggtgcatgccactacacctggctcattaaaacaaaattatttttgtagagatgagagctaactatgttgcccaggttagtcttgagctcctggcctccagtgatcctcctgccttggcctccaaagtgttgggattatagatgtgagctactgtaccaagtcttattttttatataaaggatatctgaatactattttagaaatttgttatttttaattctgctttgtcctgaacaactctttctgcattttgagaccccttaggcacaatcctcatactgatgttgaaagatggcttttgtgtgtggtgataaaccatggagagaagaattatggtattaatttcctgcctgaaaagatagagatggctccattgtgggacttccccatgcattcgaacagcctgtttcacatgtctctagacaagttataaaatgaatgttcctgttgtgctagggctgagatgaagggaaaattatattccttatgccctcttttctcacttacaaggtaaaatcaggttaatctagaaggaggaagtagtcacagaacatttatgtggtctgaagtttgtgtgtggaagtgagaagagtcagttgtattctctctgatggtggcagtggcagtagcgttacaggtcaaatagattcagagagcaccgaccgatgcagtatcctcctgctgtcatttccattgatcactgcctagttgccaattagtggaacagcataggactcctaaaacatgtagcttcacatgatctttccttagtgctttggccatttgctatcaacaatatatttttttttttgagacaaagtctcgctctatcgcccaggctggagtgcagtggcaccatctctgctcactgcaacctccacctcctgggttcaagcaattctcatgcctcagcctcccgagtagctaggattacaggctcatgccaccacagccagctaatttttgtatttttagtagagatggggtttcatcatgttggccaggctggtcttgaactcctgacctcagttgatccacctgccttggcctcccaaagtgctgggattacagacatcagccaccgcgcctggctggttatcaacacttattaagcacctagtatacaccagagcttgttttagcagctagtgttatgcaatatgaataaaatccagtttcttcccctaaatagattgttccagtttatagtacaacatgacaaatactagaacacaaatttgtaaaaattaaccatggaaataccatcatttcttttctttgtcttgcctactttgtcacaaatcaaatgtctgtataggcttgggtctctttctgaattctattctattccattaatctatttgtctttccgtcaaccagtaccacactgtcttatttactgtaactttacaataagtttggatacctgattaagttctcctactttgttcttcttcaagattatcttggctagtcttggttctatacatttccatgtaaattttagaatcactttgttagttccttaaaaacgtttttgaaattttatttgggactgaattgattctgtagatcaatttggaataatcaccttatttatgatgttgagttttcaaatccataaacatggtgtgtttcttcttttgtttagtctctcagtgttttatagtttaccttataagggtcttcttataaatcttttgtttgatttatttataggaatataatttgtaaaagttattgtataagttatatttttaaattttcattttctaatggtcactgttatatatatagtatataaatacttcaaatccagaaaatttgctaaattcgcttactaataatttatttgtagatttgtttgaactttccatacaatcatattgtctgtgaataaggaaaattttaattcttccttttcaataacaaaactatgaatatgaatgaggctagttcaatattcaaaaattgatcaatgtaattaacttaccttgtcaacagatgaaagaagtacatgatcatcccaatagatgcagaaagagaatgtgacaaaattcgactgccattcatgataaaaactctcagaaaactaggactagaagggaacttcctcaacctgacaaagcatctctacaaaaaacctgtcagtaacatcacatttgatgataaaagagaaaaagagtgtttttctggccgggcacaatggctcacacctgtaatcccaggactttgggagcctgaggtgggcggatcatgaggtcaggagttcgagacccgccttaccaacatggtaaaaccccgtctctactaaaaatacaaaaaagttagccgggtgtggtggtgcatgcccgtaatcccagctactctggaggctgaggcagaactgcttgaacccagaaggtggaggttgcagtgagccaagatcacaccactgaactccagcctgggctgacaaagcaagactccatctcaaaaaagaaaaaaagaaaaaaacaaacaaacaaacagagtgcttttcctctaatgttgggaacacggcaaggaagtccactcactactcatatttaacatactggatgtcttggctaatgcaaaaaggcaagaacaagaaataaaaaacttatggcgtgggaaggaagaaataaaactgtgtttatttgcagatgacataattgactttgtagaaaatttcaaggaatcttcagaaaaggtactagaactaatgagtgagtttagcaaggtaacaggatataaggtcaacatgcaaatataattatatttctgtaactaggaatgagtaattagaaactgaaatcaaaatagcaccaaaaaatgaaatagaaccaaaaatgagattttcaaatataaatctaacaaactatgtgtaggatctgtatgcttgcaactgcaaaactctaatgaaagaaataaaaaatgagccgggcatggtggctcatgcctgtaatcccagcactttgggaggctgaggcgggtggatcccgaggtcaggagttcaagatcagcctgaccaacatggtgaaaccctgtctctactaaaaatacaaaaattagccaggcatggtggtttgcgcctgttgtcccagctactcaggaggctgaggcaggaaaagcgcttgaacccgggaggcggaggttgcagtgagccgagatcgcaccactgcactccagcctgggcaacagagcaagactccatctccaaaaaaaaaaaaaaaagaaagaaagaacacaaaatagattttagacctaaatagatataaaacctgaaactataaaactcttcagagaaaacagaagaaaattgttgtgatctttggttaggcaaagattttttagatatgacaatccataaaagaaaaaagctattaaattgtcaaaactggaaacaaccgaaatattcttcagttgggtaatgtataaacaaattttggtacatctgtatggtggaatacatacaaccacatggatggatttcagatgtagtatactaagtgaaagaagctagcctcaaaaggctacatcttatatgattccattatatgacattctggaaaaggtgacagtctagtgacagagaacagatctggaaaaggtgacagtctagtgacagagaacagatcagtggtaagactgggggaatggtttgactagaaagcagtaaaatgaaggaatttggaaggaaggatgatcaactgttttgtattgtggtggttacatgactgtacatttgtcaaaactagtaccctaaaaagggcaactttcactactatacgtaaattatacttcaactttaaaaaagctgctacaaaaggataaattaaagtagaattgctgagtaaaatggtaagcatatttttattcaaatgtcaaactgctttccaggaagatggtccaatttagatcgtctttccccatccttgcaggagacggattgggcagcaatgggcttgtcaatcattttaacctttgccaaactgataagtgaaaagtgtatcttgatattgtttgattttcattaaaaaaattttaagtgaagccaaacatatttcacatattaggtaatcatgagtactctttatttttctgaattgtctgttaatgttttttgtttctattaaggtgttaattcatttcctgtttaatttataagcaacttttgtttgttaggaatagtaacttcatttctatttgtcattttgactctagctttattattttggagtctactttgagttttttactgattagttattctcttataacttttatgattattgcttccactacaacattgtagagactatgcctttaaggtaattaagtattttctataacctaaatacttgatcaaattttataaatgtttcctgatgctggataagaaggtaagttctgtttttaaagtaaaatgcttgatgcttatcatttaaaccaacctttatattattcagatagatttcaatgcttctgacttggattggaaaaagcatatcagaataatcagaaatttatgctcagttcacctctcttccatacgttttattctgatccaatgggcctcatttattctggctcctgcttctcttgttgagaacagtagtattatagtccttcttactcagctcagaggtgaatctctccccggaaattgtcatcagaagtgttaagcctcatccctgggggcagtgtacatccaatgactggttgatagatacaggaatacaaaagtctgccctccttgcctcaatggggacatttttgtttgtttgtttatactctttttatggcatttttttgggggaagtcctgcagtattgctaagttttataaattgggcaatggggtactcttaaaacagagacattcttggtttcctccttattattacagatgatttaaccccttttacaccatggaatactatgcagccataaaaaacgatgagttcatgtcctttgcagggacatggatgaagctgggaaccatcattctcagcaaactatcacaagaacagaaaaccaaacaccgcatgttctcactcataagtgggagttgaaccatgagaacacatggacacagggaggggaacgtcatacactggggcctgttgggggaggggtgggggagtaggggagggatagcattaggataaatacctaatgtagatgacagggtgatgggtgcagcaagccaccatggcacgtgtatacctatgtaacaagcctgcatgttctgcacatgtacaccagaacttaaagtatatttttaaaaaatgttaagcaaaaaataaaaataaagacataacaatggacttaaaaaaagtctgagctgggcacggtagctcatgcctgtaatcccagcactttgggcggccgaggtgggtggatcacgaggtcaggagttcgagaccagcttgaccaacgtggtgaaaccccgtctctactaaaaatacaaaaattagctgggcgtggtggcacgtgcctgtaatcgcagctactctggaggcggaggcaggagaatcgcttgaacccaggaggcagaggttgcagtgagctgagatcgcatcactgcactccagcctgggtgatagagtgagacgccatctcaaaaataaataaataaataaataaagggcgggacatttttttttgaaacaccacattggctccagagctccctgcaggatctgctgaggcctttgttgaagttgctcttgtgccaatcctgtttccaccattccattacaggtgttattcctgagagtactcttgaatgcaacacaatctcggtctcagagtctgtttctggagaacctgacctatgatagttactttttgtttatttgatctgtcagagatagagggagaatcagaaaagattctttccttgcttctattctacctcctgctgccctgctcatatgaaaactggtaaatttattattgcaagtgcaagatacaaatatataacttttgtatgttttgatgcatttctatttagaaattacaagttcatgaagctaattcattttgaattgtattcttttatttgctctgatattctttgcccatttaatattttgccctaaattctaatctgtttgatattagtattgtacccctgcttttttattctttgaatctgtctgatagacactggcctgaccttaacatttgtgatatcacattattgttactgaatcaaagaatttgtcttttaatgtattttaattattattataattgataataattattataactggtatgtcttatcttgcttctgtcattttgttttgtgtttcctggtttttatctttttttcctttgccttttgtagatagttctctgtgtgtgtactatgtgttttgcattcatcttcagtgatcaaaaagggatatatcctgttttaaattctgctaatgattacctttaagtttccacaaatagtatttaaccgttatttctatactcttcagagacagaagaaaatacaaagtcaaagtctgttttattaagcaagagatttggcataatttcattcctctcctcatttctgtttttatgttactgagttttagatccaaatagttggtaaatttttacattatattttattataatttttgtgaagggtggttgtataattttatttgcattatagatttttacatttttaagtcaatttaaaagattaacatttctttctcttttcattgtggtaatatatacaacataatttttttacatttaattttggttttataaccaaacttttttttttttttttgagacaggcctcactctgttgcccaggctggagtgcagtagcgtgatcttgactcattgcaacctctgcctcctgggttcaagcgattcttgtgcctcagccaccagagtagctgggattacaggtgggcaccaccatgcctggctaattttttggtatttttattagagatgaggtttcaccatgctggccaggctggtctcaaactcctgacctcaagtgatccacccgccttggcctcccaaaatgctgaatataaccaacattttgaattccatttcagtttattacaatataaactaccaatccatatgccatcacctctttctctctcttcctcctctcaatcaaagatgaatttacttgtgtgtctgacaaaggaaagcaacatcatttaggtgtgagctcaagttctctcagcaaaaatttgaagagttaaatatatgatgaaaaaagtatttcaaataatgtaatattctgattgagtgtctggttggcagattacaaatattatacagctttctttgagagagatcagtcttgtttcacatcattgatgctgggaaactggcttcaatcaggtcaagaatgggttgtgtaaaattccaaggggcctagagtcatgcagtagacgtgctgaatttcaacaaaacagtccacagaagttttgattgtaattatgttgcacccacagatcaatatacggagaactatcattctgacaatattgagttttgcaattcatgaacattatttagttcttctttaatttttaccagtaatgttttcagtatatatgtattccatatatttaaatttatctctgaatatgttatagttttgttgctattgtaaatgatatcttttaaatttaatttttggattgtttgttgttagtatataaaaatacaattgacttgtgcatatttaccttgtgtcctgtgaccttgttaaattcatttactagttctagtgttttttggtagattcctttggtattttttacatatattatcttatttatgaatatagtgttacttcttccttttcaatctcttgcttttatttcattttcttgacttataacaaagataaattcaatattgaatagaagcgatgaaagaaaacaaccttgctttatttccaagcttagggggaaagcattcagtcattcactagtaagtattatgctatctatacttatttttttttcctggtgccctttatcagtttgagaaagttttcttctaattctaggttgctgtgagtttttatcttcaataaatgttgaattttgtcaaatgctttttaggcatatggtgttctccttttttttctttttttgtttttgagatggggtctctttcacccaggctggagtgtagtgcaatctcggctcactgcaatctcagctcagttttcttctaattcgaggttgctgtgagtttttatcttcaataaatgttaaattttttcaaatgctttttaggcatatggtttgtccttttttgttttttgagatggggtctctttcacccaggctggagtgcagtggtgcagtctcggctcactgcaacctccgcttcgcgagctcaagttcaggattcttgtgatttagcttctggagtaggtgggaccacaggcaggtggcaccacacccagctaattttttttttgtagagacagggttttgccatgttgcccaggctggtctcgaactcctgaactcaagtgatccacctgcctcagcttcccaaagttctgggattataggcatgagccacagtgcctggcctcgctttttcctttattctatcaatgtggtgaattatgttgatttttaaagaatattaaaccaattttgccttattgggataaaccttacttcattacgatgtattatcttttttataaaataatgaatttcataaattttaaaaagacttttacatctctcttctacttctctattttttgagctctgcttttccccctgatctcttggtctactgtagtatacttttaatgcttttttttaaggtatgtttttttgaaaaagcctataatactatttattatcagatataaaagtaagtataattccatgatataaaattgtcattgttcatacatgactatatatgtgtatctgtctatctatctatctatctatctatctatctatctatccatccatccatatatcctctctatataaatgggagtatactatacacactaatttttactttgttgttgttttttaaatctaacagtatatcctagaaatcactctatagagatatagatatatttctcatattctctctctctttctttctctctctttgagacagggtctcactctgtcacccaggctggagtgcagtggtgcgaaatagctcactgcagcatcaaactcctgggctcaagctatccttccattctcagcctcccaattagctaggattacaggcatgcaccaccatgcctggctgatgaaaaatttttttttttggtagagacagggtctccctgtgttgtccaggctggtctcaaatcctggcctcaaataacccttctgcctcagtctcccaaaatgctgggattatagagccaccagtccaactccattcttttaaatagctgcatggtactccatggtatagatgtgccaaagttattcagctagtctgctacggatggaaatttaagttgtttctagtcttttgctattaccaacgatgctgcaatgaatagcatgtatcattttattggcttgccaatatgtattttaagtggaattgctggctcaaaggtaactacatatatgattccactacatgctcccaaattctcctccaaaggggttgtgccattttttattctcatcatcaatgtatgagacagacttgccaacagtgtgtgttgtcatcctttgtaatttttgtcagtctgataaatgagaaacaatatttcagtattgttttaacttgtatttttcttattgtgaggttgagcatctttttatatggtacaaaccatttgaatttctttttctgaaattttctgtttattttcctggcccatttttctaaaaagggcattggcatttttcttctctatgtctacaagctctttctacataggatgtcaaccctgtgccttgatgtaagtagcaaaattattttcccagtttgtcatttgtctttttactttgctaatggtatttttgacatgtaaaagcttttaatatttatttttaggtaattaatatatttcccttattctttctggatttttaagtcacaaccttactcctgggttatagagatattcatgggttttttttctagtatttgtatggttttttttttttttttttttttttttttgagatggagtctcactctgtcacccaggctggagtgcagtggcgcgatctcggctcactccaagctccgcctcccgggttcacgccattctcctgcctcagactcccaagtagctgggactacaggtgcccgccaccacgcctggctaattttttgtatttttagtggggacagggtttcaccgtgttagccaggatggtctcaatctcctgatctcgtgatccgcctgcctcggcctcccaaagtgctgggattacaggcgtgagccacggtgcccggcctgtttcatattttttagatagaaatctttcatcaatttagaatttattctgatgcatagcgtgaagaatagtttcaattaaaaacttttccaagtgactgcctagtcctaaatcaaatacctttttgctactaaagcagctaagatcctgcctttatcatatactaaattttaatatgcagctgtttctatatttatgtatttatttatgtgtttttaaaggagagtatatggatggtacattttgggcccctgtagcataactctatgttgcctttatacatcttagcttgttataaaattctcagttcattgcctcccctctgcacctcaccccttaggcagacatttagattcaggcataagcattgtagagaagtccttgtcttaaaaaaaaagtaccttcctacctcttttcaggtattatatcttttggtaggtgaaacttggatggttttgtctgttttaggtttgctccatctgccttacagtaaaagcagtttctgttattaagcatctgttgaatttgaggaatgctgaaaagtaatctggtaaaaagtatcttcctcaattttgaatccattttggatatagtctcaaattgagcaaataagcaaatgtgttaatgtctttaggagccagggttctcactgtgggagaaggaatatataaatatggaacaggataaagcaaggaataaccctgtagggatgaactggaattggagttattggtataaattcatgatttctaaaataggtatgtgcatgtttatgtgcataaatatataggtatgtgtatatatgtgtgtattgcatgtatatgtatgcgtacatatatatatacatgcatatatttcctagctctttcccctacaagggccaagaaggaaagatgccccaatagcaatgagcaaacctacagaccaaatcttggtctctaatactattttccattaaaaggaaaaatagggctttatggacaaatggctgattccagggctggggcagggtaagtgccagatgatcctgaatcatcttgttatgccagcaaataaagtagtgctcaaacaaatcatgagtcacgtcccaaggacacaggagccagccttacatggttcccattggccaactctggaacaatttgaggaccaaaataattaagtatagtaaggaatttttctaagtaggaattcatgattacctgctgataatagttggattaataaacagaggcaaaggaaggtcttgcttgcagtagaatgctgagctgtaagtatggagggagtgtaggagttggaaaatcatcatttttcaataattatggtaaagatgagatcaggcaagaatcattaatgggtgctaaatctagggggaaattttggtgagggactgtatatttgtatggtcttaaagtgtctcctcacagactgcttattagttactaggagaaaattaaaccccagtaattattcagtggagaaatgtgggcaatgtcttgcccaggtgatcaaaattaacagcaccaattgaggggaagacagacactgtgtgccttcaaatgcaataccctgagaaggacatgacatcacctgtgcagtattctggctgagtagttttagaggattctctaatagtcattagaatattttcactataatctcaaggaaacatcagacaaacacaaaattaggagaatttcatttaaaaggagtacctgctactggaggaaaccaaaccaaaccatttgtgtttaatggaacttactgtagagcaagctcatccaatccatggctcatgggctgcatgtggcccagggtggcttcaaatgcagtccaacatgaatttgtaagctttctgaaaacattatgagatttttcttgtgactttctttttagctcatcaattatcgttagtgttagtgtattttatgtgtggcccaagacaatccttcttcttccagtgtggcccagggaagccaaaagattggacatcctactgtatagagtgagggaggcacatcatcacatgaatggttgtataattaaactcatattaggcatcattaaacttctgtttgtagttggatatacttcccttaggagctggggaagacattttattttggaaatggctcatgcattgtttagaatttttttttaaataaagcacttaacacatgccaaatacaagaagtaggaagaacatttacatgatctttgggaagacagtattaagtaaaggtgaaaccaagaagtaatagtttctgccttctttgattttttaatttaatttaatttttttttttttttttttgagatggagtttggttcttgtcacccaggctggagcgtggtagcgtgatttcggctcactgcaacctctgcctccagggttcaagtgattctcatgcctcagccccctgagtagctgggactacaggcacccgccaccacgcctggctaattttgtattttttagtagagatgaagtttcaccatgttggccaggctggtttcgaactcctgacctcaagtgatctgcccacctcggcctcccatagttttgggattataggcgtgagccactgtgcctggcctgattttttaattttaaagaagacagaacaaatacaggaacatgcaagaaggtttgactgtaacatgttttgtggatttcttcctaatcactgctttctgttggctatgcttttgtgctcagaaaacacctgaaaatggtagttgcttacacaatcagatgcttgacaataatcccaggaaaattatccttatctttcttttataatgaattccaggaacaatcaggtcaatggagcatcttcggtgctgttgagaactaccaattttgtgacaatcattgaaattgtgctgcattacagtgtctttgaggacatacaaacaaaccagtatgtaaataacattatttctcttttcagctgtggttttctttttccgtgttaatcaaatccagtgttattgaagacaatatggcatagaaaattatatctgacttttttcctcaggtggttattattttacaattatctaccaaaatagaggtcaatatttcatcagtttccatatgtgagacattgtcctcctgtgttatttacaatacatgaaagcctacttagcaaacatgaagaaataaaatacatttggcaatcaaaaattggaacatgactgcctgttactaaataagatgagctagggctgtgaaataggcttttatgggaagactgtttcaaatttatgagtgatgatatgggaaacttttttttttttttgagacagggtctggctctgtggctcaggctggaatgcagtgggccgaggttggctcactgcaacctccacctcctgatctcaagccgtcctcccacctcagcctctcaagtagctggaactacagtggaactacaggtggacaacatcacacccagctaatttttgttattttttgtagagacggggtttcaccctgttgcccaggctggtctcaaactcctgagctcaagcaatctgcccacctaagcctctcaaagtgctggcattacaggcatgagccaccgtgcctggcctgggaagctcttttaacagaggtgatgtaaagtagaaaaagcagtgggctcaaaaggctgctcccaactgcctaggtgaccttagacaagtcttcatacctctctgagtctcagttttctcacctgcaagttgaagggtttataatggatgatttgtgaggtctctcaaggagtttaatacagtggttatgcagcctacagggtcacacccagtgcagagcacagctcacctggcagaggctggagaatggggacaaaagaataggatgaaaatctttggagagaattgaatgatcacctctaccactcttgcaagtcagggtgtatcccacctcttccagaaagtcaggttccagagaagacagcaggaaagaggaaggtaggacgtcaggatagtgcaggataccagacaggagtcagggcaggaaagaggtaagaagcaaagtgaaagccaagactttatatatggaaccaaccgaaaatgagctgtagaaaaaggaatgaagagctgtaattgggctaataacaaaggcatttcaaataagattggcagactttgctagagatgcctcagggcaaccagagtaattgcagcgtgcagaaatgaaagtccttttaaacttctgttgacagcctacaatgtgcttgggagttgctggaaataaaaaaactgaatcaaacatagccctgcctcttaggagtttaaaatttggagggagagacaggtatgtatgccactaaccgagctatcctttagtttgcaaatggcactaaaacagcggttcaaatcaagtgctgtgggaacacagaaaattaaatatggttgaattaaatctgataggaaggataaggaaagacttgataatggaagtgatatttaaactgggccttgagaaatgagtaggaacatcaggtggaatgctaggggagggtagaaaggacagcacatgcagaagagtgagagaatgagatggtacgatgtgtctgccacccagtgagaagccgagtgtaactggagtggagggagcactaggtaagtcgtagaggtaaagccagaagacacactgcccctggatggggaagggctctgactcttaatttaaagaatgtgggccacaatccagtaagagactggatggtgtcattagtatcagccacttgggcaggtttctagccagccaggcccagcccgttagaggctaagggtggaggagaggatgggctagcagagggagggaggaaaagagaggagttaaatcagtcttgcagtttgaagctagaaagagtggttaggaattttagtgaaattcctaaagaagaaggagatggtttgaagagagagagataataaagtaatttgggtaaagttggaaacatccatgagagacttaccattaggatattgataatgtcattctggaacttgagcgagagccagggctgggtttaactacttgggaatggaggaggtactgaggtttactcagacctgatgcccctcattgctttccataaagaatgtggtgatgtcagccacgtatatgcctggtcctgtggagatgaaactgtcataattcctgcctttgggtgggtggtgagatagatgataactaactttggtgccaaatactgtggtgagtgctaggtgtaggtccacagtccctcatctggaagacttgaggcagatgtgttaggaaattcagaatttaaggcaatatgctacatgtactatattttacataactctccagtgggatctggaccagcatgcagtaatcaaacccaattttgatttctaaagtaaagccagtgtttctaaattgaagcatgaatatctgtatttgactacaaagagtctcatgtcagttcagattaggtcaggccaccaaaaaagtttgcatcaaaattacaaaaaaacttttagttttcagagcattttacatttctgaattgtgaacaaagtagtgtggatctgttgaaagtcttatgagagcaaatacttccaacgtgagtcaaagaaggctttgcaaaggagacagcagttgagcagggtcttgaagaaagcgtaggctctcaattagcagaaaataggaatcagaggtaggataaaggagatggcatttcttttttttttcttcaacttttattttaagttccagggtacatgtgcaggatgtgcagccttgttacataggtaaatgtgtgccatggtggtttgctgcacagatcaacccatcacctaggtatgaagcccagcattcagtagctattcttcctgatgctcttcctccccccaccccaccgacaggccccagtgtgtgctgttccccccatgtgtccatgtgttctcatcattcagatcccacttacagatgagaacatgcagtgtttggttttctgttcctgcattagtttgctcaggataatggcttcagctccatccatgtccctgcaaaggacatgatcacgtttccttttatggctgcatagtattccatggtggatatgtaccacattttctttatccggtctatattgatgggcatttgggttgattccatatctttactattgtgaatagcactgcagtgaacacacatgtgcatgtgtctttatagcagaatgatttatattcctttgggtatatacccagtaatgggattgctgggtcaaatggtatttctgcctctagatctttgaggaatcaccacactgtcttccacaatggttgaactaatttacactcctaccaacagtgtaaaagcattcccttttctctgcaacctcaccagcatctgttgtttcttggctttttaataattgccattctgactagaatgagatagtgtcttattgtggtttcgatttgcatttctctaatgatcagtgtttgtaggccacacgaatgtcttcttttgagatgtgtctgtgggtttttttttcttgtaaatttgtttaagtttcttatagactggatattagacctttgtcagatggatagattgcacaaattttctcccattttataggtgtctgttcactctgatggtagttttcttttgctgtgcataagctttttagttgatttagagcccactcatcaatttttgcttttgttgcaattgcttttggtgttttcatcatgaaatctttgcccattcctatgtctagaagggtattgcctaggttgccttttagggtttttatagtttttgggttttaatttaagtctttaattcatcttgagttaatttttgtatatggtataatcaaggggtccactttcaattttctgcgtattgctagccagttctcctagcaccatgtattgaataggcaatcctttcctcattgcttgttttttttaggtttgtcaaagatcaggtggttgtaggtgtgtggttttgtttctgagttctctattctgttccttggtctatgtgtctatttttatactagtaccatgttgttctggttactgtagccttgtagtataatttgaagttgggcagcatgatgcatccagctttgttctttttgcttaggcttgtcttggctatttggtctcttttttgattccatgtgaattttaaaatagttttttctaattccgtgagaatgtcaatggtagtttaatgggagtagcattgaatctgtaaatttctttttcattatattgattcttcctatccatgagcatggaatgtttttccatttgtttgtgtcagagaggacatttcaatagagggaagaactggagcgagggtacaggggaaggaaaatccctggtttgtgtgggtcattttggctagtcttggattactggaccataggactcatgggaacgaatggcaggttcaggtgggttgtaacttgaacattaagaacttttaacaatctttggcaagattgaaacttgaaattttatcctgccactagtggagaatgtcatgaccacatctgccatctctgcatttggaaaggggaacccggtcttgtttggttcttgctctgtgccagtgcagagggttgattagaatggagggagactgaggtagggaggcagtaggcatcatggaagagaaggatgatgtgtgctggtgcaagctcagtcatggagaggatggaaatttgagatccgtgcatcagcaattttgagagccaagttagaatcaatgggactcgatgagtaattgaatagacggggtggaggaaaaggagattcaaagattgattcctggctgaagctcaaggacagaaaacaggacagtatagtgagtgatgaagattgagtgctcaggaatccatcctgggcttatatctcagctgtcacttcctacaggaaatagcttaaacttctcctcatctacaaaggaaaataataatggcatcttcctaggaggataaaaatatggcataaatgagttaatctatgtgaatactaatcacagggactgacacataagaaacatcatagctcacatgtttgtgaatcttgatgatttgatgacaagaccccaagaagatgtgtgtgtgtgtgtgtgtttttttttttttggagaccaagtgttgctctgttgcccaggctggagtgcagtggtgcgatcttggctcactgcaacctccgcctcccgagttcaagcgattctcctgcctcagcctcccaagtagctgggattacaggcatgcaccactacacccgactaatttttgcatttttagtagagacagggtttcaccatcttggtcaggctagtctcaaactcttgacatcaagtgatccacctgcctcagtctcccagagttctgggattacaggcatcagccaccatgcctggctcccaagaagtttttaattctgaaattgtttatagattaacttgtagttataatatctgtaaagtagtagtcctcaaggaggacctgtagtcttttctgtccttaaggttctgcaattacatgaaagtttcttatgtttacctctttgaatatttaatatatctaattttttctcaaaaatatgggccgagtagacaaaagtctgtcaatatactcttatctgtttcctggctgtaagaaaacatatgtactctatttttctatctataatatgaacttaaaaaaagcaaccaattgccaaaacactgttattattgaaaaaaaattaaatattactggaggtggcagggactgtgggttgaagttaagggaaataaaaagaactcctcatggacagaattttgtgaaggtgaaattcagaaaactagttacagatattcaaaatggtattgatcaatatgacaaatgctgaaagatgatttggaatttcaatctggttggagagctgcttgtcaattaggctgtcataaggattcctgtgtggcttggcctctttaaaattcttcaaaagaattacatagtctcctggatgaaaaatatatcactggactcctacctatcaagcagtgtccagctctccagagcttaggtcagatagcttgatgctcagtgctatctgaagcagatgtgatggaggctttgtgagcatccttcagaaagcatttgctgcaggaaaacgggaaagttgattcagaggttgatcatggtgtgcctgaagtggaacttaagcaaattgttgaaaaatttcaaaaatcactgaccacactcaaatacttaatcaggaaagaattgcagtttactgagaccccaggtagaaaattcaaatgcagactgagaaacacatgggagaaagtctgtggcaattacgtttcacatatgttgagttatgtaaacttacaaacatttgggattgagaactagtgttatctataaaatattttctcttaggtggcacattgattgcattatttttacaaatctcacatcatctttagcaaagtattctgcatttggaaaactttctaatataatgttctaatattttctagagttaaaagatgtttttggatttttttttcgttttgaaatgcaattcatacacctattttataaataaagtagtggtgacacaaatgtattcaatgttaacaaatgttctctaagaatgagatgaagaaattatcagtagcaagtccaaatttgagagaaaatgaatcactctgaaacaaaatcatttggggccttactcatacaatataataatatcaaacatacgtaaaatgttatattttcatatggatccttgaattatggaggattcttcagtggctttaatatcagggaaccagattaactcagatttgattcagccagtccaaataaggcaaaacccaaatgcttctgaaactatttgacagacaaattagtatcagaaactcaagatatgaggagaaaagctatgtgcaacaagcactgtgaacatttaacttttcacgttctgcatagatgaatccacagtaaactagaataaccattacaaagttaagtagtttgttttaatgagctatgtctacttagggaaagttaatgtaagacctctaccaaggatccaattcaaacaagcagcactctcctttctttcccttttatctgaaatatccatgtaatttttatttggtcttgagtttgtttcttcattatattttgactgtataggtaagacctaaaagaaacaattagaggtggcataactgaaattaatatggaaatacacacatgcataacagccaggaaagtaaattaactgatccttttgagcacttgaagacaattcatataacatctaatttgaaaatattataggtaacaggatttgcacactccatttaaaaaataaatctaatcttagcaagaaattccaccaataaaaaacaaatataaaagaaaactccagtaaatgaagacacttgtgtttctgggaaggatggctaaactgggtaatgggacccaattcttctcaaattagataacttacttaatgcaatttaaggtttgtttttgaggacttttagaaaataattctaaagttcacctgagaaagagaaaaagcaaatattttaaagccagtcataggagatcacctattaaataaaatgtaaaagcatgcgttaaagctatagtatttaaaacagaatgattaaggtataaaaagaaccaaataaatgtagcagaatagatagcctccaaacagatttgataagagaagcatcacagatcaataggtaaaaggcaagtaatttaatacatgttttgagaaagttggcaagctctttggtggaaagcatagtttttccttctctgccaaaatcctatgtacattttataagaataatacaatggactttgcagacttgggcgaaagagtgggaatggggtgagggattgggtacagtgtctactgctcgggtaatgggtgcaccaaaatcactaaagaacttattcatgtaactaaataccacctgttccccaaaaatctatggaaataagaaaacatcctatgggctgagcacagtggctcacacctgtaatcccagcactttgggaggccgaggtgggcagatcacgaggtcaggagttcgagatcagcctaaccaaaccggtgaaaccctgtctctactgaaaatacaaaagtagctgggcctggtgacatgcgcctccgcctcccgagttcaagtgattctcctgcctcagcctcccaagtagctagaattacaggtgtgcaccaccatgcccagctaatttgtgtatttttagtagagatggcgtttcaccatgttggccaggctggtctcaaactcctgacctcaggtgatccacccgcctcagcctccctctactaaaaatacaaaaatgtggtgagcatctgtaatcctagctactcaggaggctgaggcaggagaatcagttgaacccaggaggcggaggtttcagtgagctgagatggtgccactgcactccagcatgggcaacagagcgagactccatcacaaaagaaaaaaaaattctatgtaaattttagatacatttaagattaaatgtataaaaagtaataatatttgggaaaaaaatgataaatatttaaccaatctctagaagaggagaaactctctaagcataaaactaatgaaaataaccacaaagaaaaagatcagcatttttgagtttataaacttttatttctgtaaatactaaaaactaaagagaaagtatgaaaatttatgacttccaggctgggggtggtggctcacgcctgtaatcccagcactttggaaggctgaggcaggtggatcacttgaagccgggagtttgagaccagcctgggcaatgtggcagaaccctgtctccactaaaaatacaaaaattagccgggcgtgatggcttaaacccggcagacggaggctgcagtgagccaggatcatgctactgcacgctagcctggacaacagagtgagactttgtctcaaaaaaaaaaaaaaaaaaaaggaaagaaaatttatggcttccaaatatgatggcactagaatccctatagacacatggacaaagaacaagaataggtaattttgcaaaataagcctaaataacaaaaaggttgtgaaaaattcagactcatccataattaaagaaatgtccactaaagcagcaatgagaaaccactttgcttataaaattagaaaagattgaaaattgatgatgccactgaggatgtgttggggctggggctctcatcatggctggtgggaatgcgaattggtacagccaacctggaagaggatttggcagtttggaccaagggcaggaaaatgtttattatagccttggacctggtaattcctctttaggggtgtatactgagaaataatcagaaatgaagtcagaaatacagagttgttcacagcagtgttacattattttcatatcagcaagttccattatgtagttcattagaaatacaatataatttttgtgttttaccaaatatcaaatttttaaaaattgaaattgtaattgtttgcaaattttacaaccattcacatagtgccagttaacatttaaaagttttcatgtgcccattcatacttatttggattctattcagtaagttaactatataaggtgtatttaagtctagactaaaaataattcttatcattaaagacaaaggcatacccaggtatcaactttagtaaatcatgggtttaaaaaaatatttaatgaaatttaagggtatgtatgatctcattgtgattcacttttaaaaagttatatttccttttttcccttcctctggattttctctttaaccacagatagaggaagttatgaagggagaatagataccccagctccattctctacctgctcccttatctcccagctggaagccagaggtgcacaggggcccagagcacatggcacagagaggtcagactcccagggcacagagcagagcagggtagagaagggtggaaaatgggcctaggggaggggcacacagaaactcaccagcctgaagatgaatgaaaacggctgcttattccctgtggacaaacacagttactgttccttgctgctcagctgcacaggctcaaactgtgcttctgatcattcacggcagaaagataatctttgtctgtgacctctaaactcctgggctccttctccatttctctccattggaaaggaaacccatgtgtcagccacaaaagagaccatatttgtctttcagaaggaagtgctaatccatagtgcttaagggagtaagctctgacaagtctcaaaaattgtcatctaatagctcattaatgagctttaataatgattataagttgcttgaaaagttctaatcagaaagagaaaataacatgaaattaccgatcaatacatgcgcctgctcccagaaataactgcaagtcttatttaatgtaaagtcacaatggtagtggaaaacagaaaaatatcagaggtaatgagtggcagattgcactggccacaatatctcccttcctgcatgccacagtgtgattttgacgttcctcctacccaatggtaaggtgtagatcttccacttaacctggatagatttctgtgagtcaaccaatagagatagtataacggatgttacatgatgtctgagaagtcataaaaatgtcacacacttctgctttgttctcttggagagaacagagtctccatgttgtgaggaagcccaagcagcctgtggagaggacccaagaccactggtccacatcttcagttgagctcttaactgataacctctaccatgctaccaaccatatgaatgaaccatctaagaacagatccccagtactcagttgcaccttcccaggtgatgccacgtggagcagagatgacctgtttccgtccaaccccagatcactgcagatttctgagcaaaaaaataattgttactgttttaagccatcaagtttgaaatggtttgtatgtagtaaatggaccaatgatgaatccttgaaaagtggaagacaaatgaaattgagcgaaagaagaaactatcccaagatattcctagggaggcctattacagaatggttgcacctgttcagtgagtcctgggaaggactatttctggttagaactggaggcagcctggccaacctgtccctacttctatgaggtgtcgggcagcaaaacagagaaaagggaatgatgaaaataactaataatttaaaaagggccggacgcggtggctcatgcctgtaatcccagcactttgggaggcctaggcgggtggatcacctgaagtcaggagttcaagaccagcctggctaacatagtgaaaccccatctctacaaaaatacaaaaattagctgtgcacctgtaatcccacctatttaggaggctgatgtgggagaattgcttgaaccctggaggcggaggttgcagtgagccgagatcgtgccattgcactccagcctgggcgacagagcaagactctgtctcaaaaaataaataaataaataaataaataaataattaataaaataaaataaaataaaaataaataaaagattaaagaacctagaagagtagttcaatgaaattcaaagctgattcttcgaaatattaataaaatagaattgtggttataaaacagagatctgttgcaatgaggaaagatatataattacagatgaagagacttataaaagatacagctacagatgacttataaaacattgatgtgggcaattttgtaacaataaataaaaaaccgtagatgaagtaaatattttctaaaaaataggtatatagttgaatgtattcctagcaccatatgctgcagactcttctctgcagaaatacagagaagagagaaataagtttaaaaaagtatcaagaagggaacaaatgcagagtgtgacccagtatttgcaacaaatcggtaactggaaaagaagcgggtgaagattatcctacatgaaaggcatagatacatggcaactataaggaagagttggctcttttttgaatcctgatttgaacaataaagcgtagaaataaaattttgaaacaataggggaaatacaattaaggactgagtaccaaataacagagctggtcctggggtgaggcacacgaggtgccttggggtacaaactttaaggaggcactgaccctgcattagcacagccgagagagcaatgcttccttcattttcatgccctaggtgccttgcttacttcacctgagtctcatacctgtcaagtattataccttttttttgaggtttaataatggcattgtgattacataacaaaatatttgcatttttttagagatgtgtattacatcatggagaggtgaaatgacgtgtctgggatttgctttaaaacagttcagcaagaaaaagggatagatgaagcaaatgtggcagcatctaggtaactgtggaaattgcataatgagtgtttggggatttgttatatattcttttgaatggttgaaaattttcataataaactttgttttaaactgggtaacagcatgacaacataaataatggcatcaccgaaatggacatatttgctgatctcccaaattttcctgtccactggtatcctttattcttggcctgccatcctcttcccaggatgaaatgcagacaatgtgcccctccatgactggtgtacaatgctaggaaattcaaggcatcactgccctgggtctccccttggtaacctggacaaggatgggagacactgtggatatgtactttacctgaaactttagaaagataaaaggagtcacttgaggcctcccaaaggaaactgggagttgaagtgggcgtaagggatgtagggtcagatctcggttcaaatcccaactctgccgtcagcaaagtactgaacttttctgagccctggtttctttggctgtgaaaacaggaatgttaatatttatcctaaaaggattgatgtgggaattaagtgagataacgtttgtgaaaatccttagtaccttgcctggaacatggaagctactctgtttcttccctctttccttgaaggagagatgtctttggcatctttaggctgcagttgtgcattatggatgggagaattctgttttttggggacataacagctgttacccctgttcttactcaactatagtctgaatgactgagttttgctcttgaagaccctctgtgtcaaaatgccactgtggagattttttttctgggaggattctgactgtgttttcaaccactcagagaccacagctgttgagttccactttcccttccctgtcccccagtactgggcccctcaccctgaggttgctgctctcccagaccacattctcacattgcctgattctatgaccaaaccagatgagtctaccagatgaaaaatcactttgccagtgtctgaattttcctctccagatcttccagaagtcttgctgaggcctctgacctttgcatgaacacctggtggcttgtgagagacccaaggcattctgatgtgtagcccagcttgagacttagaatctgttttctccagccattgattctagggcaacaaagaagttcctgctcaacattccgtttcatgtatgtagaaaaatatggacacatacacaaaatatacgtattaatgtttgaggttttggatttaatagcaataggagtccataagcaggagatgtcaggaatggcttcaaggaggaggtgaaggggagttttggaggttgaacaaaatttagataaaggaagagaaggaaagatgaaaggcattcacaagcttgactcccatccagcaccctgttagattttctttataatttgccactggaaacctccagaaaagttatcagatgagtttgttttagagtaagtaagctggaaaaaaaagataatattggaaaactcagaccatagttcagtatcatttctgagtgtttgtgagggtagcaagtgtgcagccataggtagactagacccatgatgtcccaagacagggttcctctgttcttaacttgtgctaaggtaaaccaaggatgacgtaaaatttctattattagtacagcctgtatttttaatcttcctcatcacaataagccaaaagccttaccacacagtttgatgtgaagatttattttttagaccagtgtgtgactgaagtagctgggtgggcagtgggtgggggtaaaggtgacggaggatcattggagaagctcctatagggagaggagacgaagctcaggttggcagagctgctgaggtacaccaggcctgggtgccctctgtggcctgaggatcccctcctccctggagccttcttttaggattccatgatgtcagctacagaaaacaggagttcccacagcagtggaagcacccagccaatgacatcagaatctgtggggtggacccagcatatgctcttttcaaagccctctggttaatccaatgtgcagctaaggctgagaacatccactctaaacatttagaccgtagttgctctgggtcctgactgcagattcaaaccacatttcttgaaaaattatcctgtcttttaggcctatctcccaagactctgctatcgcatggggtgggccaacccaggcattgggaatttaaaaaaactccccaaaatgattctaatgagcaaccaaggttgggagccaatgtcctaattttaagaaagcagctaacaactaaagccagaacctcccctccacacatcacctaagaggtggcagaaatagctcaacaaacactcctacaagcagcctaactctcatctcttcgtcaggaggacactgggaggggagagtgggccttggagaaggaaaaggttagtagggtcaggttatccccttcctctatatggagggagtgggagtgctgagggggtcacagggggcttccataggactccaatagagagagggcctgccagaagggagaacgatgacagttcttagcaaggtagttctcccatgtcagggaactttaggaggttctgctgctggatctcccccaaattatccacatatcccaggagagatgatacatggagtctgccttgttgtgggcttcagggccaggcactgtcagccagggcagcaatgacttcaggggagaaagaatgccagctgctgccagctgaggaatgagacaagtttcttccttctctcctcatcccaacatcattttccaatcctgtgtattccatttccccacactccatgcagttggggtctctgctgaagcccacaatggggacaggagggaagaagatttcaatggaattctatggactgaatttaataaccaaaagcaactagaggagaaattctctgataggcctaagatgaggactagaacaagggacctgatgtggccaaactggaagcagaggctagagaaatagcagccagtttctgtctattgcctgctgagtagagaccatttactgcatcagttactcacatgttgtgtccctctacaagattcgaaggtctttgagggcaggaatacacctgatgcttttgaaacaaccaaaagccaggcccgcactgggcatagagcagaggcaggttcttccccacatcctggataatcttttcattctgcttggtctactggtggcacagaggttttgttttaaactaaggctttctcacctcattgttggggggggggattaattataaaataaaggtacagctcaggtaaattgttttacactacatgagcaatatggcattggcaacaattttaaaaagtttttggaaggttacatttgactttgaagctggatatctgtaagttcacagatattccctgaccccagcttgtggtgctccttggcagccagtgataatgcctgagacccgcattttatactggccctaaaattcaagcagttttggaggtctttattaatctcttaagtcaaccaacctctctccacttagaatactggaaggattccaaagtggaaaggtatttattgagtgtatattgcaatgacttaccctgaaatcactgtgttggggaattaatttacatgaaacattgcaggtcattttattgcttcagttctcccatactacctttgttccgagaatctggaggttccttgggaataggatggaaagacttctgcaccttggccccctaaatcaagaggagaaacaatcttgccattttagtgttaaaatgagtgctgatgcaaacatttacctttttatttatactgataatctaatgaataatctgaaaatatggccaggggaggaggattgccaggaatgataaacacatagtaaagtagtttgatatgcaggaaactgcttctaaaatacactagctggtgcttactgagggaaacaattactcttcggatacaacctgctttcgttctatagccatctttttctttctatttttttttttacaaaaatatttatcttaatggtatatttccctacagacttttttcatattcatattttacaaggatacaaatcatctatgttcaatttttcattccttttaaaaatttaatatatagcataaatgtcttcaagttattatgtagtattcatatctataattttaatgctaaaattattttgttaggtaacttataataatttatttaaatataacctaatataagaatttgagtttgcctccaattttactattataaaaatgccatttttgctattataaaatgtatttttatgatgtgcctttttattattttgaacttcttaagagcaggttctcagaagtgaagttttggggcacaatgtttgaaatcattttaattcttgacaaaattgctgaatttctttccaaaatgactataccaatgtacaactctcccatacacaactttctttttacggtcttatgaaagccttcttttatttactgagaaaaaagtagaagccatttgtgttatcatagcatgataaactccccaaaatctctccaaaatgaaaatgaaattcatgcatatttttagagaggagaaaagtagagaaacatggtgttggactatcacaactgtgtgtgtgtgtgtgtgtgtgtgtgtgtgtggtgggctttgtaaagaattggggcttaatgtacctaacaaacgactaatcttttgcctgaaaaataggctgagctgaccagatggtgagtggaatgaaatcactttcctaccattatgggcaagatttctaactctttgtcacccactctgttcttcctaggcagtaagtcaatggggaggcttgcttataaacgacaggaggcaaaaccccatctccaccctaatttctcatcacttgttcagtacctattcatttagacttttgtctttaatacgtgtattttcccttggcaataccataatgtcttttttttgtctcttcaccataatcatgatgaacaaaaatgtaatgcacatagtattccttcatttgagtctttcttttattcttttaatttcaaactgctgttcttcctaaaggaggactgtgttacaaaagaatgaaattttccagacaatgtttggtacataatagttttaagaggcttcatgtttgcaagagacaaattaagcagcctcccctaatatgtagacaacatctgttacacagtcaccattaatgataacactgggatctcttttgtggctgattttcatccagctgcacctacccataaaaggcgccagcaaagagggctacacatttatctgtcagttcagaatgactttggaaaatggcacataaacctaaagcaaatctttgttaacctctgaaatcagagcctccataaatcactgctaaggacagcttataacctcctcacagccaactcatcatctccattcagtgtttgataagatgctccaaatcttaggctggttatacagaagaaagctacacatcaagaaactaagccttatgtttggtgcccacctgtaaagaaacacacatacccattgatcaattacaagtttttgctccaaagctttatttcagacaacattcccacctgcaccaatggatctcttcctaagtaataaaaacgctacaaaatccttggtagggctaattagctatggctaatcatttgatttgatgacttgttattatttgaaattaaacattaagattcttaaatgaaaaccattcagaaagctaggagaggggttccactttctttgcaagactgagctgtatgaaatctctttcttacaatttggttgtgaaatgtattctggtatattttcatctctgggtttccctgtggatatatatcttatagtgtaacatgtcaatttactcatttaatacctactcaagtgccctctctgtttcagtcctggtgctagatgctggagatatgtgaaggaaaaaataaatcaagtctctacgctcaggtacttgtatccaccacaggcatagagaaaaaacaaatggctcagattataaataaagcaagagtgattgagggttggcattttaaatgtgatgttcagagaaggcctttatttgtacagaatcctaaataaaacaatggagatagcagtgtgaattggcaggaaaagagcatcccaggcagagggaacagaattgctcaggccccaaacttggcaagtgcaagaaacagcacagaagcctgtctggttggatgctgatgcaagacggaaagcaagtttgtgaaggtgggcaggggtcaggccttggagggccttgaaggccatagtaaggagtacaggttctacactatgtgaaggaatgctttaggaggttcttgagcagtggactattgtctggcttatattcactttggtacaacaccaaattcaactaaatgcagttttcacgctagctgaaagatctctctgagcataaatcataatgtaactcagcttctccacctgttaacaatgggtttatgtatttccaaggtgttcacagatggctttcagagagtccacagaatgcttgtaaaatgtatattttcgcatatatttaaaaaattcagacctcacaaaggctaagaaccactgatctagaggaccctaaattcagttagagctgtactgttcgaggattctttaggtcttcaacacacctggcactcttagcaactttttcaatgaaggacctaattgttcattaactcattttctttctttattctgaacctatttatgcctagttttccattattggaatgctaagcatgtgggagttatttatattcttctgctcaaggtcattgccaaggtctgatttttcaaattcaaaaaattgcaacctcaaacataaacgggttaatcacatgtgtagtttcaagtctctttgtcccatctagtagattacattaaattcttcatccctttctgaatctgtgtcctttgccatgtagctttgcaaagaaggggtgtacttttgcacacctgacttgttttggctagtgggatatcagcagacaagaaagaaagagctgggacaacacttgtgaagtctttttcttttgcctccatcatgatcatgagaagaacatggccaggctaaccagccagtgccaggaggatgagagtcatgtgaagcagagctcagtcaccttagccaagcccaggctggactggttaatgcccagacacgtgagttagcccagttgaagtcagctaaactgctcagcctacccaaagatctgcaagcggttgaggttcttattgttgtatgctgctgagatttcttttgaggctgtttattatgcagcaatagttaactgatatgccatattgctaccatatttgtagcctcctttttaaaagacaccatattggagatcctgaattaagttcttttgtacccattttgggtcctgattcaaagctgaattcccagtttctaattgtataaccatgataatcaaccctggttgtttatacttccttattggtacacactccagcttttccttcaaaagctgccacagctgtttacagaagccaagtcctggaggattccactagtggcagaagggtgaaatttgcagccctaatctcgtaatgctgggactcagcctgacagtggtatatgccacaacatcctagctgaatataagaatgctaatgaaggatacaagtcctccttcagaccaggagtataagctgtcgaaccttgctaaatggctgtaatgaatgtaaactacagcataccagctgaaccttgggatacgcttaattgcccagggtggcttaatcttcagccctgccagttgcagaaggattatttgtctttggtgaactcagtggagaattgaaagtaaatttgtttaaacgatagtagagtttagaataggcataacagaagaatcataaataaccacgactgaaatgtaaactacaaccaaatctaagcccactctttgtctaaggattgcatccttgaggaaggagggagcaccagtttcttgatttaggcttttattaagccatattatgagtcactaggagaacaaatgggttctatttaaaataacaggcatggccaaagcaacatgaccatcatttcaaagctacatttccctgaatgagccttcaaaagggggggatgtcagagttttgctgattttgaacctcactatccccaaattccacttcttccccaaatgcatagaaacaagatagccttggatcttaatcacacttttttcttaaaaaaagttttttttactggctgggcgcagtggctcacgtctgtagtcctggcactttgggaggccaagatgtgaggatcgtttgagcccaagaggtcgaggctgcagtgagctatgagcgtgccactaccctccggcctaggtgtcagagcaaccctgcccacaaaaagttttgaaaaggtgatataagtagatggcaaagtttctttcaaatgataggaaaataatgaaaattaagccttcctcatacactgtttatctttaatccctcaattcatttgaggtaagtgggttgtcttgctctttgtgatacaaattatccaaaaatgtattgaaatattgaataattcttttcattgtttggtttttaagattttgtgagtactaacataaagacctagagattattttctcaatactgttaacaagttgattgcctcaattatttgcctggcttcaactatacagactgactttaagtgcaaaacaataatgagcatctttaataacaatgaccatcttttctcaatatggacagccacaaacagtgtttaaaaatatatctaactcattattcatgtacaaaaatgtgtattgtggaggaaatgattataaattcttcatgtatattgacttctgtggaagactcctgtttgcctagcacaatctcttctttccttcttcctgtaatattaatagaagcttagttttatttaggacaaacatattatccactaaaaggccacattttccagtgtcccagctaggtgactaggccatgtgactaggttttggccaatgagtttaaagcagaagtgttatatggtatttcttgaagagtggaggcacatctttattccttacttctccagctactttggaatgtggatgtgggcagctaggcctccaactgcctgctatcttgggtcatgagaaaaagggtcattctagagatggtagaacagacgacttcagagagccaggtttctgatgactttgcagagctgccttgccagtcctgaactgtatgcctcgacatttattttgcaagaaagaaaaataatttctatcttatataagcgtattattcagggttctccagagaaacagaccaataggaaatgcacacacacacacatttcctattggttataggatatatacatttgtcccttagtatccataggagattggttcctggacctcccgtgggtaacaaaatatgtagatgctcaagtgcctgatataaaacggcataacatttgcatgtaacctatgtatatcctatttacctcttcccatctaacttttttttttttttttgagatgctgttgtccagaccggagtgcagtggcgtaatctcagctcactgcaacctccgtctcccgagttcaagcgattcttttgccttagccccccaagtagctgggactacaggcatgcaccaccacacctggctaatttttgtatttttagtagagatgggatttcactatattggccaggcggtcttgaactcctgacctcaggtgatctgccccccttggcctcccagagtgctgggattacaggcttgagccaccgtgtctggccccttccccatatactttaaatcatctttagattacttataatacctaataaaatgtaaatgttatgtaaataattgctaactgtattgttcagggcataatgacaaggaaaaaatgtctgtacatgttcagtagagatgcagttttgtttgcaaagtttttaatctgaagttgaagctacagatgccaagggctgactatatacaaatacacatacatctatatataaagagagagagggagagagagagagagagagagagagagaaagagagatgatagaaattggttcatgattatggaggctaagaagtgatttagcctcatgatttgtcatcttcaagctggagaatcaggaaagctggtagataattcaattcgagtccagaggtgtaagtcctagtccatgtctgatgacctgagaactgggaatgccaatgttggagagcaggagaaaatggatgttccagctcaaatagaagcaaattcacccttctccatatttttgttctattcagtccttcgacaaatatgatgatgctcacccatactggtgagaggaattttccttactcagcctatgaattgaaatgttaatcttttccagaaacaccctcacagacatgcccagcccagaaataatgttttgccagctatctgggcatcccttatcccagtcaagttgacacatacaattaagcatcacaaaatgctactgtcatttagggttttctgtcattcccagacaaacctaatccttattgctatgctttcatattgcttctgagcttccgaagcaacagcagcagcagcagcgacaaatcatctcatggcacctatttcagtccctggcaaatgtgggcttggagaagcataagagagcactattagtacagagtcagtgttgcttacattcagtgacactgagtatgaatttcaaatggtggtataggaaatgaatgaaccaattctgttttctttctgaccacttgataaatgatgtccctgttttggccctgctattacctttggaggtatttatgaggcccagtgcctttataatagcctatcagtctcctgttttcaaattagtccattttttgcacctcagtgcttatttaggacatggactgctggatctgcctttcctaggagccccaggagctgagagataacatattcctgggtttggttctttctttctctctctctcatcctctctttctccctccattcctccctccatccttccctaacttttttcttttctctttctttcatctcccctccctccctcccttccttccttcttccttcctctgacatacagtgcataattttaagtgtatagctccacaaactatatatatctacaaacattcacatatgtaaacacccatgtataaccaccattccattccagacaagctacatttcctgtctggcatggaatggaaccttaccctagaagcgtctctcaggttccttcccagttcataaagacttccaccagagttaatgactattctgacttttatcctcatagattactctttgcctgtttctaagctttatataaatagaaccatacaatgtgtgttcttttatgtctggcttttttcattcaacataatgattttgagattaatccatgttgttccttatatcaaaaaattaaagagaagaaaaatcagtgaattggaagctaaaaggatttcactctgatgtggaacagagatagaaagagactttaaaatcatttcatatgtgaaacacctctgtatgaaagattagttgagatatagatgatagactaaatgactccaacagtcatctaacagggaatagagaagtgaatggaggtcatggaagatgaacaacgtttagaggggtgatagcttaaaattttccagaatttgagagaagccacctgtcttgaagtcaaaagggtactttcaactccagaaaggatacataaaaataaatcatctagacctatcataatgaggtcacggaagagcaaggatgaagcaacaatccgaaagtgcactgaggttctgactccagagtgatagagacattttagatcttcattaggagggggttacatagatgtagatatttatcaaaacatatccaattatatacttaagagctatgcatttcactggatacaattttatcttactttataaagggtattgagggcagagttgagggaatcccctgctttccactcagaactgtggctaaactgagcagagttctcattgctacaataaatgtcaaggacagtagagcaagatcttcaagatgttgagggaaaaataactatttacctatctttcaagaatgaaggcaaaataaaaatatttttagtcatacaaatattattttcagattctctctaaaataacatttttttaaggatacacttgagtaaattttttaaaaacataccagctggacgtggtggctcacgtctgtaatcccagcactttggggcgctgaggtgggcagatcacgaggtcagtagttcaagaccagcctggccaatatggcgaaaccccgtctctactaaaaatacagaaattagccaggcacggtggcacacgcctgtagtcccagctactcggtaggctgcagcagaagaatcacttgaacccaggaggcagaggttgcagtgtgctgagactgtgccactgcactccagcctgggtgacagagcgagactccatctaaaaaaaaaaaaaaaaaaaaaagaaagatatcacaggagattatgggctatcagaaacaaaagtgactatgtcaattggtaaaattaattatttattgactgcaaaactaaaaaaagagaagcctcttttggggtgtaagaaaggtaaaactcgggctgggcacggtggctcaagcctgtaatctcagcactttgggaggccgagacgggcggatcacaaggtcaggagattgagaccatcctggctaacatggtgaaaccccgtctctactaaaaatacaaaaaattagctgggcgtggtggcgggcgcctgtagtcccagctgctcgggaggctgaggcaggagaatggcgtgaacctgggaggtggagcttgcagtgagccgagatcgcgccactgcactccagcctgggagacagagcaagactcttgtctcaaacaaacaaaaaaaaaaaaaaaaaaaaaaaaaaaaggtaaaactcaaattctaaacaataacaatatgaggaagggagtgttgagtagtattcaatggataaagtatgctaaagtcatcgtggtctgtaggaaatgagacatattgaataattgttggaaaaaaacggacagataattgtgcatgttaatatctgaaaggctaccattaaaagaataaagcttttgaccaggtgtggtggctcatgcctgtaatcccagcactttgggaggccaaggcaggtggatcacttgaggtcaggagttcaagaccagcctggccaacacagtgaaaccctgtttctactaaaaaaatacaaaaattagctggtcgtggtggtgcacgcctgtaatcccagctactcgggaggctgaggcacaagaatcctttgaacccgggagatggaggctgcagtgagctgagatcacgccactgcactccagcctgggtgacagaacgagactctgtctcaaaataaatgaataaataaataaataaagagaaaaataaaataaataaataaaataaaataaataaataaataaaaacacactcggctcactgcaagctccgcctcccgggttcatgccattctcctgcctcagcctactgagtagctgggactacaggcgcctgccactacgcttggctaattttttgtatttttagtagagacggggtttagtagccaggatggtctcgatttcctgacctcgtgatccaattgcctcggcctcccaaagtgctgggattacaggcatgaaccaccacgcctggcctgccatatacttattatatctgtcctttctgtgtgtgaatattaaacttttaaaaagttaagagagaaataaataagcacctctttgttctctgtcttcacccttcaaggaccgtcctcccctttaatactggtaataatgtacgaaatcccatcttcagcagaaagtccttatctttcatcagttccttttatattgtattcctaggaattcccaagaatgctgtcaagttctacaaatgcatcttggtggacttgatgctgcttgcatgggacttcaacatccttcccctctgactatctcatcactgtttcgccatatgcagcaattctgctagggatactttgtctcaaaggatggacctaaagcaatgcatttctttcccaaagaaacacaactaactcaaaatgcttgcaaatatttccgaaggagagaaaaggaagatttgaatggaatatttgatactactattcctctggtctattggactatgttcctcacacaggattttctcctggggctaacgctgatgacgcacacatttcatcctctgaaatggggatccctttcactttatctttcctctttgtgtctagggtaccaagtctcaggaaacagaagaccatattgatttggtctgttagacttagtgcaggagtgcaaatcagtggcttcccacaaattttatttcacagtattattcatcttctctgttattatgtagcttaacgaattaccccaaatttcattggctcacaaaagcaaatatttgtttttcttgccccatatctgtgagtcagctgcaatggccctgctataggttatgggtatttgttcttcattctgtgacctgcgatggaggatcaatcgttaccctggacacactctttctttctttttttttttttatactttaagttctagggtacatgtgcacaacgtgcaggtttgttacatatgtatacatgtgacctgttggtgtgctgcacctgttaactcgtcatttacattaggtatatctcctaatgctatcccttccccctccccccaccccaccacaggccccagtgtgtgatgttcgccaccctgtgtccaagggttctcattgttcaattcccacctatgagtgagaacatgcagtgtttggttttctgtccttgtgatagtttgctgagaatgatggtttctagcttcatccatgtccctacaaaggacatgaactcatccttttttatggctgcgtagtattccatggtgtatatgtgccacattttgttaatccagtctatcattgatggacatttgggttggttccaagtctttgctattgtgaatagtgctgcaataaacatatgtgtgcatgtgtctttatagcagcatgatttataatcttctgggtatatgcccagtaatgggatggctgggtcaaatggtatttctagttctagatccttaaggaattgccacactgtcttccacaatggttgaactagtttacagtcccaccaacaatgtaaaagtgttcctatttctccacatcctctccagcacctgttatttcctgactttttaatgatcgccattctaactggtgtgagatggtatctcattgtggttttgatttgcatttctctgatggccagtgatgatgaacattttttcatgtgtctgttggctgcataaatgtcttcttttgagaagtgtctgtttatatctttgcccactttttgatgggattgtttgatttttttcttgtaaatttgtttaagttctttgtaggttctttctggatattagccctttgtcagatgagtagattgtaaaaattttctcccatgctgtaggttgcctgttcactctgatggtagtttcttttgctgtgcagaagctctttagtttaattagatcccatttgtcaattttggcttttgttgccattgcttttggtgttttagtcatgaagtccttgcccatgcctatggcctgaattgtattgcctaggttttcttctagggtttttatggttttaggtctaacagttaagtctttaatccatcttgaattaatttttgtataaggtgtaaggaagggatccagtttcagctttctaagtatggctagccagttttcccagcaccatttattaaatagggaatcctttccccatttgttgtttttgtcaggtctgtcaaagatcagatggatgtagatgtgtggtattatttctgagagctctactctgttccattggtctatatctctgttttggtaccagtaccatgctgttttggtt
